(19) United States
(12) Patent Application Publication
(10) Pub. No.: US 2025/0263468 A1
(43) Pub. Date: Aug. 21, 2025

(54) BINDING MOLECULE HAVING NEUTRALIZING ACTIVITY AGAINST CORONAVIRUS SUPERFAMILY

(71) Applicants: CELLTRION INC., Yeonsu-gu Incheon (KR); KOREA DISEASE CONTROL AND PREVENTION AGENCY, Chungcheongbuk-do (KR)

(72) Inventors: Cheol-Min KIM, Yeonsu-gu Incheon (KR); Ji-Min SEO, Yeonsu-gu Incheon (KR); Yong-Jin AN, Yeonsu-gu Incheon (KR); Min-Soo KIM, Yeonsu-gu Incheon (KR); Soo-Young LEE, Yeonsu-gu Incheon (KR); Hee-Young LIM, Chungcheongbuk-do (KR); Joo-Yeon LEE, Chungcheongbuk-do (KR); Kyung-Chang KIM, Chungcheongbuk-do (KR); Jeong-Sun YANG, Chungcheongbuk-do (KR); Han-Saem LEE, Chungcheongbuk-do (KR); Hye-Min WOO, Chungcheongbuk-do (KR); Jun-Won KIM, Chungcheongbuk-do (KR)

(21) Appl. No.: 18/006,417

(22) PCT Filed: Jul. 23, 2021
(86) PCT No.: PCT/KR2021/009567

§ 371 Date: Jun. 15, 2023

(30) Foreign Application Priority Data
Jul. 24, 2020 (KR) 10-2020-0092285
Sep. 11, 2020 (KR) 10-2020-0116817
Nov. 13, 2020 (KR) 10-2020-0152158
Dec. 10, 2020 (KR) 10-2020-0171999
Feb. 10, 2021 (KR) 10-2021-0019481
Mar. 22, 2021 (KR) 10-2021-0036902
Mar. 30, 2021 (KR) 10-2021-0041251
Jun. 9, 2021 (KR) 10-2021-0075095

(51) Int. Cl. C07K 16/10; A61K 39/00

(52) U.S. Cl. CPC C07K 16/1003; A61K 2039/505; C07K 2317/21; C07K 2317/52; C07K 2317/622; C07K 2317/76; C07K 2317/92

(57) ABSTRACT

The present invention relates to a binding molecule having neutralizing activity against the coronavirus superfamily. More specifically, the binding molecule of the present invention has excellent binding affinity and excellent neutralizing efficacy against various coronavirus species that may infect humans, including not only wild-type SARS-coronavirus-2 (SARS-CoV-2) and mutant viruses that may occur in the future, but also SARS-coronavirus-1 (SARS-CoV-1), Middle East respiratory syndrome coronavirus (MERS-CoV), etc., which infect humans, causing fatal diseases. Thus, the binding molecule is very useful for the diagnosis, prevention or treatment of diseases caused by coronaviruses.

### TECHNICAL FIELD

[0001] The present invention relates to a binding molecule having neutralizing activity against the coronavirus superfamily, and more specifically, to a binding molecule having excellent binding affinity and neutralizing efficacy against various coronavirus species that may infect humans, including not only wild type SARS-coronavirus-2 (SARS-CoV-2) and mutant viruses that may occur in the future, but also SARS-coronavirus-1 (SARS-CoV-1), Middle East respiratory syndrome coronavirus (MERS-CoV), etc., which infect humans, causing fatal diseases.

### BACKGROUND ART

[0002] Coronaviruses refer to viruses belonging to the family Coronaviridae and are generally found not only in birds but also in various mammals including humans. It is known that there are various coronavirus species, and coronaviruses cause both respiratory and digestive infectious diseases depending on the characteristics of the virus and on the host. Coronaviruses are viruses that cause respiratory illnesses of varying severity from the common cold to fatal pneumonia. Viruses belonging to the family Coronaviridae generally have a single-stranded, infectious, positive sense RNA genome with a length of 27 to 32 kb, and contain a cap at the 5′ end of the genome and a poly A tail at the 3′ end. Coronaviruses have an envelope, and contain major outer membrane proteins such as spike (S) protein and envelope (E) protein. The spike protein is involved in viral infection and pathogenicity, such as neutralizing antibody induction, receptor binding, and membrane fusion, and the envelope (E) protein is involved in morphogenesis of viral particles and extracellular release of the virus after infection.

[0003] Seven types of coronavirus are known to cause disease in humans, and infection with three types among them may cause even more severe or fatal pneumonia in humans. The three types that are fatal to humans include SARS-coronavirus-1 (SARS-CoV-1), which was identified as the cause of the 2003 severe acute respiratory syndrome outbreak which was a worldwide problem, MERS-coronavirus (MERS-CoV), which was identified as the cause of the 2012 Middle East respiratory syndrome outbreak, and the new coronavirus severe acute respiratory syndrome coronavirus 2 (SARS-CoV-2), which was first found in Wuhan, China in late 2019 and identified as the cause of coronavirus infection 2019 (COVID-19).

[0004] Severe acute respiratory syndrome (SARS) coronavirus 1 (SARS-CoV-1) is surrounded by a spherical envelope, like other coronaviruses, and has crown-like spikes (spike protein, S protein) on its surface. Severe acute respiratory syndrome caused by SARS coronavirus was first identified in China, and resulted in more than 8,000 cases and more than 800 deaths worldwide by mid-2003. So far, there is no antiviral agent that can treat human SARS coronavirus infection. However, ribavirin is used in the early stage of the infection, and high-concentration steroids may be used to suppress immune-mediated damage to infected tissues.

[0005] Middle East respiratory syndrome (MERS) coronavirus (MERS-CoV) has a single positive-stranded RNA genome, and the genes thereof are arranged in the order of RNA polymerase gene, structural protein genes, envelope protein, membrane protein, and nucleocapsid protein. The virus that causes Middle East respiratory syndrome (MERS) is a coronavirus similar to the virus that causes severe acute respiratory syndrome (SARS). There is no specific treatment for MERS, and nonsteroidal anti-inflammatory drugs (NSAIDs) such as acetaminophen or ibuprofen are administered to relieve fever and muscle pain.

[0006] Severe acute respiratory syndrome (SARS) coronavirus 2 (SARS-CoV-2) is a positive-sense single-stranded RNA coronavirus when subjected to DNA sequencing. SARS-CoV-2 is contagious to humans and is the cause of coronavirus disease 2019 (COVID-19). The first outbreak of COVID-19 occurred in Wuhan, Hubei Province, China.

[0007] People infected with SARS-CoV-2 may exhibit mild to severe symptoms such as fever, cough, shortness of breath, and diarrhea. People with complications or illnesses and the elderly are more likely to die.

[0008] In particular, early detection and treatment are very important because people with underlying diseases such as heart disease and diabetes are more susceptible to infection and more likely to suffer from complications or organ damage. From Dec. 8, 2019 to Mar. 20, 2020, there were 245,550 patients, among whom 10,049 died, which is a mortality rate of 4.09% (WHO). The virus spread to 177 countries, including Korea, by 2020.

[0009] Currently, there is no therapeutic agent for coronavirus disease 2019 (COVID-19), and therapeutic effects are expected to be exhibited by administering existing therapeutic agents to patients. Ebola therapeutic agents or candidates, for example, antiviral drugs such as favipiravir, remdesivir, and galidesivir, and a hepatitis C drug such as ribavirin, are being used as therapeutic agents for COVID-19. In addition, the antimalarial drug chloroquine has also been shown to be effective against COVID-19, and thus is in open-label clinical trials. However, ribavirin, which is a hepatitis C therapeutic drug, may have severe side effects such as anemia, and interferon, which is an antiviral drug, is also recommended to be used with caution because of the various side effects thereof.

[0010] Although these drugs have been used in the treatment of COVID-19 patients and show therapeutic effects thereon, it has not yet been clearly proven on what mechanism they are effective. In China, it was announced that plasma therapy of injecting the plasma of patients who had recovered from COVID-19 was effective in the treatment of severely ill patients, but the therapeutic effect thereof is unclear and is highly uncertain.

[0011] In Korea, the COVID-19 Central Clinical Trial TF (Task Force) established a treatment principle for COVID-19 on Feb. 13, 2020, and announced that Kaletra, which is an AIDS therapeutic agent, and chloroquine and hydroxychloroquine, which are antimalarial drugs, are recommended as the first-line therapeutic agents, and ribavirin and interferon are not recommended as the first-line therapeutic agents due to side effects thereof. As for mild cases or young patients, and 10 days after the onset of the disease, it was judged that the symptoms would improve without administration of an antiviral drug, and it was agreed to administer antiviral drugs to the elderly, patients with underlying diseases, and severely ill patients.

[0012] The US CDC i) announced that COVID-19 could become endemic like MERS rather than a seasonal pandemic virus and cause infection, and ii) mentioned the need to strengthen surveillance so that data-based conclusions can be drawn although there is no evidence that the coronavirus is lurking in the real community due to the spread of the virus to the community at some point this year or next year (Feb. 13, 2020).

[0013] The Korea Disease Control and Prevention Agency (formerly Korea Centers for Disease Control and Prevention) announced that i) COVID-19 could be a long-term epidemic like influenza and thus it should be included in monitoring programs such as that used for influenza, and ii) coronaviruses (4 types) that are prevalent among people are also prevalent from winter to spring, leaving the possibility that COVID-19 could also become endemic (Feb. 17, 2020).

[0014] Unlike SARS and MERS, there are concerns about the realization of the COVID-19 pandemic, but there is the possibility of a lull after spring (April), so there are many experts who take a careful approach depending on the progress thereof. Due to the lack of information on COVID-19, experts have different opinions on future developments, but few experts predict that it will be resolved in a short time. Although further progress of COVID-19 will be influenced by the accuracy of analysis of prevalence and characteristics of COVID-19 and by how long the crisis from COVID-19 will last, there are concerns about the possibility of endemic disease if it is spread worldwide through asymptomatic infected people. There is an urgent need to prepare countermeasures for the likelihood of recurrence of COVID-19 worldwide.

[0015] In addition, recently, there have been more than 50,000 confirmed cases of COVID-19 per day in the United States alone, and it is the opinion of the academic community that the occurrence of about 200,000 confirmed cases of COVID-19 per day around the world is due to mutation of the virus. Research results that coronaviruses mutate into a contagious form and that mutation occurs in the spike protein are amplifying concerns, and if mutation occurs in a part playing an important role in viral infection, such as the spike protein, it may also influence the development of vaccines and therapeutic agents. As various mutant SARS-CoV-2 viruses have been reported, it is urgent to provide a method capable of acting against not only wild-type viruses but also mutant viruses.

[0016] A rapid diagnostic test (RDT) is also referred to by various names such as “immunochromatographic analysis”, “rapid kit analysis”, and the like. A user can simply detect an analyte from a biological or chemical sample by the rapid diagnostic test. The rapid diagnostic test is a method capable of qualitatively and quantitatively testing analytes within a short time using the properties of biological or chemical materials that specifically adhere to each other.

[0017] The rapid diagnostic test is the most advanced assay kit among the detection methods developed until recently, in view of simplicity and quickness, and is usefully used to diagnose various disease-causing substances such as antibodies or antigens of infectious pathogens, cancer factors, heart disease markers, and the like.

[0018] There is no specific preventive agent, therapeutic agent, or diagnostic kit for coronaviruses including SARS-CoV-2, or SARS-CoV-1 and MERS-CoV which are likely to re-emerge. Accordingly, the present inventors have made efforts to develop a therapeutic antibody capable of acting against mutant viruses and coronaviruses that are likely to occur later.

[0019] Accordingly, the present applicant has conducted extensive studies, and as a result, developed an antibody capable of neutralizing not only wild-type COVID-19 and mutant COVID-19 viruses, but also viruses belonging to the family Coronaviridae, such as SARS or MERS, thereby completing the present invention.

### DISCLOSURE

### Technical Problem

[0020] In order to solve the above-described problems, the present inventors have developed a binding molecule that is able to bind to various coronavirus species that may infect humans, including not only wild type SARS-coronavirus-2 (SARS-CoV-2) and mutant viruses that may occur in the future, but also SARS-coronavirus-1 (SARS-CoV-1), Middle East respiratory syndrome coronavirus (MERS-CoV), etc., which infect humans, causing fatal diseases, and have found that the binding molecule has excellent binding affinity and/or neutralizing efficacy, thereby completing the present invention.

[0021] An object of the present invention is to provide a neutralizing binding molecule that binds to a spike protein (S protein) on the surface of coronavirus.

[0022] Another object of the present invention is to provide a composition for diagnosing, preventing or treating a disease caused by coronavirus, the composition comprising the binding molecule.

[0023] Still another object of the present invention is to provide a kit for diagnosing, preventing or treating a disease caused by coronavirus, the kit comprising the binding molecule.

[0024] Yet another object of the present invention is to provide a method of diagnosing, preventing or treating a disease caused by coronavirus by administering the composition to a subject having the disease caused by coronavirus.

### Technical Solution

[0025] To achieve the above objects, the present invention provides a binding molecule, particularly a neutralizing binding molecule, which binds to a spike protein (S protein) on the surface of coronavirus.

[0026] The present invention also provides an immunoconjugate in which at least one tag is additionally conjugated to the binding molecule.

[0027] The present invention also provides a nucleic acid molecule encoding the binding molecule.

[0028] The present invention also provides an expression vector into which the nucleic acid molecule has been inserted.

[0029] The present invention also provides a cell line transformed with the expression vector.

[0030] The present invention also provides a composition for diagnosing, preventing or treating a disease caused by coronavirus, the composition comprising the binding molecule.

[0031] The present invention also provides a kit for diagnosing, preventing or treating a disease caused by coronavirus, the kit comprising the binding molecule.

[0032] The present invention also provides a method for diagnosing, preventing or treating a disease caused by coronavirus, the method comprising a step of administering a therapeutically effective amount of the composition to a subject having the disease caused by coronavirus.

[0033] The present invention also provides a strip for immunochromatographic analysis, the strip comprising the binding molecule.

[0034] The present invention also provides a diagnostic kit for diagnosing a disease caused by coronavirus, the diagnostic kit comprising the strip for immunochromatographic analysis.

[0035] The present invention also provides a method of detecting a disease caused by coronavirus using the diagnostic kit.

[0036] The present invention also provides a method of diagnosing a disease caused by coronavirus using the diagnostic kit.

### Advantageous Effects

[0037] The binding molecule of the present invention has excellent binding affinity and excellent neutralizing efficacy against various coronavirus species that may infect humans, including not only wild type SARS-coronavirus-2 (SARS-CoV-2) and mutant viruses that may occur in the future, but also SARS-coronavirus-1 (SARS-CoV-1), Middle East respiratory syndrome coronavirus (MERS-CoV), etc., which infect humans, causing fatal diseases. Thus, the binding molecule is very useful for the diagnosis, prevention or treatment of a disease caused by coronavirus.

### BRIEF DESCRIPTION OF DRAWINGS

[0038] FIG. 1 shows the results of evaluating the mechanism of action of antibody No. 32 according to an embodiment of the present invention by performing biolayer interference (BLI) analysis using Octet.

[0039] FIG. 2a shows the results of evaluating the average body weight of each group every day for 6 days before and after infection with SARS-CoV-2 virus during a mouse animal experiment conducted using the binding molecule of the present invention.

[0040] FIG. 2b shows the results of measuring the virus titer of mouse lung tissue using Vero cells after inoculation with SARS-CoV-2 virus during a mouse animal experiment conducted using the binding molecule of the present invention.

[0041] FIG. 2c shows the results of measuring the virus titer of mouse nasal lavage using Vero cells after inoculation with SARS-CoV-2 virus during a mouse animal experiment conducted using the binding molecule of the present invention.

### BEST MODE

[0042] Hereinafter, the present invention will be described in more detail.

[0043] The scope of the present invention is not limited by the following description, and in particular, may include all aspects that may vary depending on the experimental conditions described in the following Examples and the like. Since the scope of the present invention will be defined by the appended claims, terms used herein for further understanding are used only for the purpose of describing embodiments of the present invention in detail, and the scope of the present invention is not limited thereby.

[0044] Unless otherwise defined herein, all technical and scientific terms used in the present specification are to be interpreted as having the same meanings as those commonly understood by those of ordinary skill in the art. All of the references mentioned in the present specification are incorporated herein by reference in their entirety to describe the invention of the present specification.

[0045] The present invention includes a binding molecule having ability to bind to or to neutralize all or part of a spike protein (S protein) on the surface of coronavirus, particularly SARS-coronavirus-2 (SARS-CoV-2), SARS-coronavirus-1 (SARS-CoV-1), and/or Middle East respiratory syndrome coronavirus (MERS-CoV), an immunoconjugate in which at least one tag is additionally conjugated to the binding molecule, a nucleic acid molecule encoding the binding molecule, an expression vector into which the nucleic acid molecule has been inserted, and/or a cell line transformed with the expression vector; a composition for diagnosing, ameliorating, preventing and/or treating a disease caused by coronavirus and a kit for diagnosing, ameliorating, preventing and/or treating a disease caused by coronavirus, which comprise at least one of the foregoing; a method of diagnosing, ameliorating, preventing and/or treating a disease caused by coronavirus using at least one of the foregoing, the use thereof for the diagnosis, amelioration, prevention or treatment of a disease caused by coronavirus, and the use thereof for the preparation of the binding molecule, the immunoconjugate, the nucleic acid molecule, the expression vector, the cell line, the composition or the kit for diagnosing, preventing and/or treating a disease caused by coronavirus, but the scope of the present invention is not limited thereto, and all analogues thereof may be included within the scope intended by the present invention.

[0046] The present invention is directed to a binding molecule and a neutralizing binding molecule, which bind to a spike protein (S protein) on the surface of coronavirus, particularly at least one selected from the group consisting of a receptor binding domain (RBD), S1 domain and S2 domain in the spike protein. The coronavirus may be at least one selected from the group consisting of SARS-coronavirus-2 (SARS-CoV-2), SARS-coronavirus-1 (SARS-CoV-1), and Middle East respiratory syndrome coronavirus (MERS-CoV).

[0047] The spike protein (S protein) on the surface of SARS-coronavirus-2 (SARS-CoV-2) of the present invention may consist of or comprise the sequence of SEQ ID NO: 1,521, and may include derivatives and/or variants thereof, without being limited thereto.

[0048] The receptor binding domain (RBD) of the spike protein on the surface of SARS-coronavirus-2 of the present invention may consist of or comprise the sequence of SEQ ID NO: 1,522, and may include derivatives and/or variants thereof, without being limited thereto.

[0049] In an embodiment of the present invention, the coronavirus may be:
[0050] i) SARS-coronavirus-2 (SARS-CoV-2) and SARS-coronavirus-1 (SARS-CoV-1);
[0051] ii) SARS-coronavirus-2 (SARS-CoV-2) and Middle East respiratory syndrome coronavirus (MERS-CoV); or
[0052] iii) SARS-coronavirus-2 (SARS-CoV-2), SARS-coronavirus-1 (SARS-CoV-1) and Middle East respiratory syndrome coronavirus (MERS-CoV).

[0053] The binding molecule may bind to a spike protein on the surface of SARS-coronavirus-2 (SARS-CoV-2), particularly the receptor binding domain (RBD), S1 domain and S2 domain; and/or a spike protein on SARS-coronavirus-1 (SARS-CoV-1); and/or a spike protein on MERS-coronavirus (MERS-CoV).

[0054] In one embodiment of the present invention, the neutralizing binding molecule of the present invention may have excellent binding affinity and/or excellent neutralizing activity against the spike protein of coronavirus, in particular, SARS-coronavirus-2 (SARS-CoV-2). The neutralizing binding molecule of the present invention may have excellent binding affinity for the spike protein of SARS-coronavirus-2 (SARS-CoV-2), and/or exhibit excellent neutralizing activity against wild-type SARS-coronavirus-2 (SARS-CoV-2). In addition, the neutralizing binding molecule of the present invention may also exhibit excellent neutralizing activity against a mutant virus having a mutation in the spike protein of SARS-coronavirus-2 (SARS-CoV-2). As an example, the neutralizing binding molecule of the present invention may also exhibit neutralizing activity against a virus having a mutation in S protein domains other than the RBD of the spike protein of SARS-coronavirus-2 (SARS-CoV-2), without being limited thereto.

[0055] In one embodiment of the present invention, the neutralizing binding molecule of the present invention may bind to the spike protein of SARS-coronavirus-2 (SARS-CoV-2), particularly the receptor binding domain (RBD), S1 domain and S2 domain; and/or the spike protein of SARS-coronavirus-1 (SARS-CoV-1); and/or the spike protein of MERS-coronavirus (MERS-CoV), and exhibit neutralizing activity against various coronavirus species, including SARS-coronavirus-2 (SARS-CoV-2), SARS-coronavirus-1 (SARS-CoV-1) and/or MERS-coronavirus (MERS-CoV).

[0056] Coronaviruses are RNA viruses belonging to the subfamily Coronavirinae of the family Coronaviridae, and are divided according to the host into four genera: alpha-, beta-, delta-, and gamma-coronaviruses. Not only human corona viruses but also mammalian coronaviruses found in cats, pigs, cattle, and bats mainly belong to the alpha- and beta-coronavirus genera, and most viruses infecting birds belong to the genus gamma-coronavirus. It is known that there are various coronavirus species, and coronaviruses cause both respiratory and digestive infectious diseases depending on the characteristics of the virus and on the host. Coronaviruses are viruses that cause respiratory illnesses of varying severity from the common cold to fatal pneumonia. Viruses belonging to the family Coronaviridae generally have a single-stranded, infectious, positive sense RNA genome with a length of 27 to 32 kb, and contain a cap at the 5′ end of the genome and a poly A tail at the 3′ end. Coronaviruses have an envelope, and contain major outer membrane proteins such as spike (S) protein and envelope (E) protein. The spike protein is involved in viral infection and pathogenicity, such as neutralizing antibody induction, receptor binding, and membrane fusion, and the envelope (E) protein is involved in morphogenesis of viral particles and extracellular release of the virus after infection.

[0057] Seven types of coronavirus are known to cause disease in humans, and infection with three types among them may cause even more severe or fatal pneumonia in humans. The three types that are fatal to humans include SARS-coronavirus-1 (SARS-CoV-1), which was identified as the cause of the 2002 severe acute respiratory syndrome outbreak which was a worldwide problem, MERS-coronavirus (MERS-CoV), which was identified as the cause of the 2012 Middle East respiratory syndrome outbreak, and the new coronavirus severe acute respiratory syndrome coronavirus 2 (SARS-CoV-2), which was first found in Wuhan, China in late 2019 and identified as the cause of coronavirus infection 2019 (COVID-19). Severe acute respiratory syndrome (SARS) coronavirus 2, SARS-CoV-2) is the cause of coronavirus infection 2019 (COVID-19), and is a novel coronavirus first found in Wuhan, China in late 2019.

[0058] SARS-coronavirus-1 (SARS-CoV-1) is a new infectious disease that has spread to countries worldwide, including Hong Kong, Singapore, and Canada, within a few months after its first outbreak in China in the winter of 2002, and the causative agent of SARS is SARS coronavirus-1. SARS-CoV-1 is presumed to have crossed the interspecies barrier from animals to infect humans by coronavirus variants that use animals as hosts. It is known that the main symptoms of SARS-CoV-1 are fever and cough, a sharp decrease in blood oxygen saturation, dyspnea, pneumonia, etc., and most of SARS-CoV-1 patients recover, but SARS-CoV-1 can be the cause of death in the elderly or children. Since there is no vaccine or therapeutic agent for prevention, it has been recommended to prescribe flu drugs, antiviral drugs, and the like.

[0059] MERS-coronavirus (MERS-CoV) was first detected in Jordan and Saudi Arabia in 2012, and most MERS-CoV infections occurred in Saudi Arabia, and occurred in people who traveled to the Middle East from other countries or worked in the Middle East. MERS-coronavirus is spread through close contact with MERS patients or through airborne droplets released by an infected person coughing or sneezing, and most people infected with MERS experience fever, chills, muscle pain, and cough. So far, there is no MERS vaccine and therapeutic agent in Korea and other countries. For treatment of MERS-CoV, it is generally recommended to use drugs such as the immunomodulator interferon and the antiviral agent ribavirin or lopinavir. However, it has been reported that interferon and ribavirin cause side effects such as bone marrow function deterioration, anemia and viral mutations, and thus there are concerns about the safety thereof. In addition, co-administration of interferon and ribavirin showed a therapeutic effect against MERS in the monkey model, but it did not show a great effect on MERS patients in actual clinical practice, and thus there has been a need to develop a safer and more effective agent for treatment of MERS. In Korea, there has been no additional occurrence after the last occurrence of MERS-coronavirus infection, but MERS-coronavirus infection has continuously occurred in Middle Eastern countries, and thus it is necessary to prepare countermeasures against the re-introduction of MERS-coronavirus.

[0060] The World Health Organization (WHO) classifies SARS-coronavirus-2 (SARS-CoV-2) into six types based on amino acid changes due to differences in the gene sequence. SARS-CoV-2 was first classified into S and L types, and was then further divided into L, V, and G types, and G was subdivided into GH and GR, resulting in a total of six types: S, L, V, G, GH, and GR. At the beginning of the outbreak of COVID-19, S and V types were prevalent in Asian regions including Wuhan, China, and then different types were discovered in each continent, and the SARS-coronavirus-2 of the present invention includes these types. Among these, it has been reported that the GH type is likely to have high transmissibility. In Korea, based on the results of classifying genes collected from patients with coronavirus infection, most of them were found to be GH type, which is a variant of the G type prevalent in Europe and the United States, and this type is known to be highly transmissible. In particular, the G-type virus, in which the amino acid at position 614 of the spike protein, which plays an important role in the intracellular invasion of the virus, changed from aspartic acid (D) to glycine (G), has increased rapidly in Europe and the United States since March, and now appears in almost all regions, and the SARS-coronavirus-2 of the present invention includes the same. A recent report showed that more than 70 coronavirus variants occurred, among which 8 variants (D614G, etc.) having increased transmissibility, 10 variants (A841V, etc.) avoiding neutralizing antibodies, and 17 variants (I472V, etc.) on which plasma treatment effects are low, were identified, and the SARS-coronavirus-2 of the present invention includes these variants.

[0061] In one embodiment, the neutralizing binding molecule of the present invention may exhibit neutralizing activity against strains such as an S type (the amino acid at position 614 of the S protein is D), L type, V type, G type (the amino acid at position 614 of the S protein is G), GH type, or GR type, based on the amino acid mutation in SARS-coronavirus-2 (SARS-CoV-2), without being limited thereto. Examples of the SARS-CoV-2 virus S-type include, but are not limited to, a BetaCoV/Korea/KCDC03/2020 strain. Examples of the SARS-CoV-2 virus G-type include, but are not limited to, hCoV-19/South Korea/KUMC17/2020 strain. In one embodiment, the neutralizing binding molecule of the present invention may also exhibit neutralizing activity against a mutant virus having D614G mutation at amino acid position 614 of the spike protein of SARS-coronavirus-2 (SARS-CoV-2).

[0062] In one embodiment of the present invention, the neutralizing binding molecule of the present invention may have neutralizing activity against any one or more mutant viruses selected from the group consisting of the following mutant viruses 1) to 39), without being limited thereto.
[0063] 1) a mutant virus having a mutation at one or more of amino acid positions 69 and 70 of the spike protein of SARS-coronavirus-2;
[0064] 2) a mutant virus having a mutation at amino acid position 80 of the spike protein of SARS-coronavirus-2;
[0065] 3) a mutant virus having a mutation at amino acid position 222 of the spike protein of SARS-coronavirus-2;
[0066] 4) a mutant virus having a mutation at amino acid position 234 of the spike protein of SARS-coronavirus-2;
[0067] 5) a mutant virus having a mutation at amino acid position 372 of the spike protein of SARS-coronavirus-2;
[0068] 6) a mutant virus having a mutation at amino acid position 384 of the spike protein of SARS-coronavirus-2;
[0069] 7) a mutant virus having a mutation at amino acid position 406 of the spike protein of SARS-coronavirus-2;
[0070] 8) a mutant virus having a mutation at amino acid position 417 of the spike protein of SARS-coronavirus-2;
[0071] 9) a mutant virus having a mutation at amino acid position 420 of the spike protein of SARS-coronavirus-2;
[0072] 10) a mutant virus having a mutation at amino acid position 439 of the spike protein of SARS-coronavirus-2;
[0073] 11) a mutant virus having a mutation at amino acid position 440 of the spike protein of SARS-coronavirus-2;
[0074] 12) a mutant virus having a mutation at amino acid position 444 of the spike protein of SARS-coronavirus-2;
[0075] 13) a mutant virus having a mutation at amino acid position 445 of the spike protein of SARS-coronavirus-2;
[0076] 14) a mutant virus having a mutation at amino acid position 446 of the spike protein of SARS-coronavirus-2;
[0077] 15) a mutant virus having a mutation at amino acid position 449 of the spike protein of SARS-coronavirus-2;
[0078] 16) a mutant virus having a mutation at amino acid position 452 of the spike protein of SARS-coronavirus-2;
[0079] 17) a mutant virus having a mutation at amino acid position 453 of the spike protein of SARS-coronavirus-2;
[0080] 18) a mutant virus having a mutation at amino acid position 455 of the spike protein of SARS-coronavirus-2;
[0081] 19) a mutant virus having a mutation at amino acid position 456 of the spike protein of SARS-coronavirus-2;
[0082] 20) a mutant virus having a mutation at amino acid position 460 of the spike protein of SARS-coronavirus-2;
[0083] 21) a mutant virus having a mutation at amino acid position 473 of the spike protein of SARS-coronavirus-2;
[0084] 22) a mutant virus having a mutation at amino acid position 475 of the spike protein of SARS-coronavirus-2;
[0085] 23) a mutant virus having a mutation at amino acid position 476 of the spike protein of SARS-coronavirus-2;
[0086] 24) a mutant virus having a mutation at amino acid position 477 of the spike protein of SARS-coronavirus-2;
[0087] 25) a mutant virus having a mutation at amino acid position 478 of the spike protein of SARS-coronavirus-2;
[0088] 26) a mutant virus having a mutation at amino acid position 484 of the spike protein of SARS-coronavirus-2;
[0089] 27) a mutant virus having a mutation at amino acid position 486 of the spike protein of SARS-coronavirus-2;
[0090] 28) a mutant virus having a mutation at amino acid position 489 of the spike protein of SARS-coronavirus-2;
[0091] 29) a mutant virus having a mutation at amino acid position 490 of the spike protein of SARS-coronavirus-2;
[0092] 30) a mutant virus having a mutation at amino acid position 493 of the spike protein of SARS-coronavirus-2;
[0093] 31) a mutant virus having a mutation at amino acid position 494 of the spike protein of SARS-coronavirus-2;
[0094] 32) a mutant virus having a mutation at amino acid position 498 of the spike protein of SARS-coronavirus-2;
[0095] 33) a mutant virus having a mutation at amino acid position 501 of the spike protein of SARS-coronavirus-2;
[0096] 34) a mutant virus having a mutation at amino acid position 614 of the spike protein of SARS-coronavirus-2;
[0097] 35) a mutant virus having a mutation at amino acid position 677 of the spike protein of SARS-coronavirus-2;
[0098] 36) a mutant virus having a mutation at amino acid position 681 of the spike protein of SARS-coronavirus-2;
[0099] 37) a mutant virus having a mutation at amino acid position 685 of the spike protein of SARS-coronavirus-2;
[0100] 38) a mutant virus having a mutation at amino acid position 701 of the spike protein of SARS-coronavirus-2; and
[0101] 39) a mutant virus having a mutation at amino acid position 1,176 of the spike protein of SARS-coronavirus-2.

[0102] In one embodiment of the present invention, the neutralizing binding molecule of the present invention may have neutralizing activity against any one or more mutant viruses selected from the group consisting of the following mutant viruses 1) to 39), without being limited thereto.
[0103] 1) a mutant virus having HV69-70del mutation at amino acid positions 69 and 70 of the spike protein of SARS-coronavirus-2;
[0104] 2) a mutant virus having D80A mutation at amino acid position 80 of the spike protein of SARS-coronavirus-2;
[0105] 3) a mutant virus having A222V mutation at amino acid position 222 of the spike protein of SARS-coronavirus-2;
[0106] 4) a mutant virus having N234Q mutation at amino acid position 234 of the spike protein of SARS-coronavirus-2;
[0107] 5) a mutant virus having A372V mutation at amino acid position 372 of the spike protein of SARS-coronavirus-2;
[0108] 6) a mutant virus having P384L mutation at amino acid position 384 of the spike protein of SARS-coronavirus-2;
[0109] 7) a mutant virus having E406Q mutation or E406W mutation at amino acid position 406 of the spike protein of SARS-coronavirus-2;
[0110] 8) a mutant virus having K417N mutation, K417T mutation or K417E mutation at amino acid position 417 of the spike protein of SARS-coronavirus-2;
[0111] 9) a mutant virus having D420N mutation at amino acid position 420 of the spike protein of SARS-coronavirus-2;
[0112] 10) a mutant virus having N439K mutation at amino acid position 439 of the spike protein of SARS-coronavirus-2;
[0113] 11) a mutant virus having N440D mutation at amino acid position 440 of the spike protein of SARS-coronavirus-2;
[0114] 12) a mutant virus having K444Q mutation at amino acid position 444 of the spike protein of SARS-coronavirus-2;
[0115] 13) a mutant virus having V445A mutation at amino acid position 445 of the spike protein of SARS-coronavirus-2;
[0116] 14) a mutant virus having G446V mutation or G446S mutation at amino acid position 446 of the spike protein of SARS-coronavirus-2;
[0117] 15) a mutant virus having Y449N mutation at amino acid position 449 of the spike protein of SARS-coronavirus-2;
[0118] 16) a mutant virus having L452R mutation at amino acid position 452 of the spike protein of SARS-coronavirus-2;
[0119] 17) a mutant virus having Y453F mutation at amino acid position 453 of the spike protein of SARS-coronavirus-2;
[0120] 18) a mutant virus having L455F mutation at amino acid position 455 of the spike protein of SARS-coronavirus-2;
[0121] 19) a mutant virus having F456L mutation at amino acid position 456 of the spike protein of SARS-coronavirus-2;
[0122] 20) a mutant virus having N460T mutation at amino acid position 460 of the spike protein of SARS-coronavirus-2;
[0123] 21) a mutant virus having Y473F mutation at amino acid position 473 of the spike protein of SARS-coronavirus-2;
[0124] 22) a mutant virus having A475V mutation at amino acid position 475 of the spike protein of SARS-coronavirus-2;
[0125] 23) a mutant virus having G476S mutation at amino acid position 476 of the spike protein of SARS-coronavirus-2;
[0126] 24) a mutant virus having S477N mutation or S477R mutation at amino acid position 477 of the spike protein of SARS-coronavirus-2;
[0127] 25) a mutant virus having T478K mutation at amino acid position 478 of the spike protein of SARS-coronavirus-2;
[0128] 26) a mutant virus having E484K mutation, E484G mutation or E484Q mutation at amino acid position 484 of the spike protein of SARS-coronavirus-2;
[0129] 27) a mutant virus having F486V mutation, F486I mutation, F486S mutation or F486L mutation at amino acid position 486 of the spike protein of SARS-coronavirus-2;
[0130] 28) a mutant virus having Y489H mutation at amino acid position 489 of the spike protein of SARS-coronavirus-2;
[0131] 29) a mutant virus having F490S mutation at amino acid position 490 of the spike protein of SARS-coronavirus-2;
[0132] 30) a mutant virus having Q493K mutation, Q493R mutation, Q493M mutation, Q493Y mutation or Q493A mutation at amino acid position 493 of the spike protein of SARS-coronavirus-2;
[0133] 31) a mutant virus having S494P mutation, S494Q mutation or S494L mutation at amino acid position 494 of the spike protein of SARS-coronavirus-2;
[0134] 32) a mutant virus having Q498H mutation at amino acid position 498 of the spike protein of SARS-coronavirus-2;
[0135] 33) a mutant virus having N501Y mutation, N501T mutation or N501F mutation at amino acid position 501 of the spike protein of SARS-coronavirus-2;
[0136] 34) a mutant virus having D614G mutation at amino acid position 614 of the spike protein of SARS-coronavirus-2;
[0137] 35) a mutant virus having Q677H mutation at amino acid position 677 of the spike protein of SARS-coronavirus-2;
[0138] 36) a mutant virus having P681H mutation or P681R mutation at amino acid position 681 of the spike protein of SARS-coronavirus-2;
[0139] 37) a mutant virus having R685H mutation at amino acid position 685 of the spike protein of SARS-coronavirus-2;
[0140] 38) a mutant virus having A701V mutation at amino acid position 701 of the spike protein of SARS-coronavirus-2; and
[0141] 39) a mutant virus having V1176F mutation at amino acid position 1,176 of the spike protein of SARS-coronavirus-2.

[0142] In one embodiment thereof, the neutralizing binding molecule of the present invention has binding affinity and/or neutralizing activity against SARS-coronavirus-2 strains isolated to date, for example, the UNKNOWN-LR757996 strain and the SARS-CoV-2/Hu/DP/Kng/19-027 strain, the isolation date and location of which are unknown; Wuhan-Hu-1 strain isolated in China in December 2019; BetaCoV/Wuhan/IPBCAMS-WH-01/2019 strain first isolated in China on Dec. 23, 2019; BetaCoV/Wuhan/IPBCAMS-WH-02/2019 strain, BetaCoV/Wuhan/IPBCAMS-WH-03/2019 strain, BetaCoV/Wuhan/IPBCAMS-WH-04/2019 strain, WIV02 strain, WIV04 strain, WIV05 strain, WIV06 strain, and WIV07 strain isolated in China on Dec. 30, 2019; 2019-nCoV/Japan/TY/WK-521/2020 strain, 2019-nCoV/Japan/TY/WK-501/2020 strain, 2019-nCoV/Japan/TY/WK-012/2020 strain, and 2019-nCoV/Japan/KY/V-029/2020 strain isolated in Japan in January 2020; SNU01 strain isolated in Korea in January 2020; BetaCoV/Korea/KCDC03/2020 strain isolated in Korea; BetaCoV/Wuhan/IPBCAMS-WH-05/2020 strain isolated in China in Jan. 1, 2020; 2019-nCoV WHU02 strain, and 2019-nCoV WHU01 strain isolated in China on Jan. 2, 2020; SARS-CoV-2/WH-09/human/2020/CHN strain isolated in China in Jan. 8, 2020; 2019-nCoV_HKU-SZ-002a_2020 strain isolated in China on Jan. 10, 2020; 2019-nCoV_HKU-SZ-005b_2020 strain isolated in China on Jan. 11, 2020; SARS-CoV-2/Yunnan-01/human/2020/CHN strain isolated in China on Jan. 17, 2020; 2019-nCoV/USA-WA1/2020 strain isolated in the United States on Jan. 19, 2020; HZ-1 strain isolated in China on Jan. 20, 2020; 2019-nCoV/USA-IL1/2020 strain isolated in the United States on Jan. 21, 2020; 2019-nCoV/USA-CA2/2020 strain, and 2019-nCoV/USA-AZ1/2020 strain isolated in the United States on Jan. 22, 2020; 2019-nCoV/USA-CA1/2020 strain isolated in the United States on Jan. 23, 2020; Australia/VIC01/2020 strain isolated in Australia on Jan. 25, 2020; 2019-nCoV/USA-WA1-F6/2020 strain, and 2019-nCoV/USA-WA1-A12/2020 strain isolated in the United States on Jan. 25, 2020; 2019-nCoV/USA-CA6/2020 strain isolated in the United States on Jan. 27, 2020; 2019-nCoV/USA-IL2/2020 strain isolated in the United States on Jan. 28, 2020; 2019-nCoV/USA-MA1/2020 strain, 2019-nCoV/USA-CA5/2020 strain, 2019-nCoV/USA-CA4/2020 strain, and 2019-nCoV/USA-CA3/2020 strain isolated in the United States on Jan. 29, 2020; nCoV-FIN-29 Jan. 2020 strain isolated in Finland on Jan. 29, 2020; SARS-CoV-2/IQTC02/human/2020/CHN strain isolated in China on Jan. 29, 2020; 2019-nCoV/USA-WI1/2020 strain isolated in the United States on Jan. 31, 2020; SARS-CoV-2/NTU01/2020/TWN strain isolated in Taiwan on Jan. 31, 2020; SARS-CoV-2/NTU02/2020/TWN strain isolated in Taiwan on Feb. 5, 2020; 2019-nCoV/USA-CA7/2020 strain isolated in the United States on Feb. 6, 2020; SARS-CoV-2/01/human/2020/SWE strain isolated in Sweden on Feb. 7, 2020; 2019-nCoV/USA-CA8/2020 strain isolated in the United States on Feb. 10, 2020; 2019-nCoV/USA-TX1/2020 strain isolated in the United States on Feb. 11, 2020; 2019-nCoV/USA-CA9/2020 strain isolated in the United States on Feb. 23, 2020; SARS-CoV-2/SP02/human/2020/BRA strain isolated in Brazil on Feb. 28, 2020; UNKNOWN-LR757995, UNKNOWN-LR757997, UNKNOWN-LR757998, and SARS-CoV-2/Hu/DP/Kng/19-020, the isolation date and location of which are unknown; 2019-nCoV/Japan/AI/I-004/2020 isolated in Japan in January 2020; SARS0CoV-2/61-TW/human/2020/NPL isolated in Nepal on Jan. 13, 2020; SARS-CoV-2/IQTC01/human/2020/CHN strain isolated in China on Feb. 5, 2020; hCoV-19/South Korea/KUMC17/2020 strain isolated in Korea, and SARS-coronavirus-2 strain to be isolated in the future, without being limited thereto.

[0143] In one embodiment, the neutralizing binding molecule of the present invention has binding affinity and/or neutralizing activity against SARS-coronavirus-1 (SARS-CoV-1) strains, for example, SIN2500, SIN2677, SIN2679, SIN2748 and SIN2744 strains isolated in Singapore; icSARS-CoV (SARS-CoV Urbani strain) strain isolated in Hanoi; Urbani v2163 strain; TW-1 strain; TOR-2 strain isolated in Canada; CUHK-W1 and HKU-39849 strains isolated in Hong Kong; and GZ01 strain isolated in Guangzhou; and BJ01, BJ02, BJ03 and BJ04 strains isolated in Beijing, without being limited thereto.

[0144] In one embodiment, the neutralizing binding molecule of the present invention has binding affinity and/or neutralizing activity against Middle East respiratory syndrome coronavirus (MERS-CoV) strains, for example, EMC/2012 strain isolated in Saudi Arabia; MERS-HCoV/Jordan/01 strain isolated in Jordan; 2c England-Qatar/2012 strain isolated in England; MERS-CoV/Korea/KNIH/002_05_2015 and KOREA/Seoul/168-2-2015 strains isolated in Korea; Jeddah_C9313/KSA/2014 strain; Florida/USA-2_Saudi Arabia 2014 strain isolated in Saudi Arabia; and icMERS-CoV-T1015N strain, without being limited thereto.

[0145] Coronaviruses can cause not only the common cold in humans, but also direct viral bronchitis or secondary bacterial bronchitis. Seven types of human coronavirus have been reported, such as human coronavirus 299E (HCoV-229E), human coronavirus OC43 (HCoV-OC43), human coronavirus NL63 (HCoV-NL63), human coronavirus HKU1 (HCoV-HKU1), Middle East respiratory syndrome coronavirus (MERS-CoV), severe acute respiratory syndrome coronavirus 1 (SARS-CoV-1), and SARS-coronavirus-2 (SARS-CoV-2). Infection with four types (HCoV-229E, HCoV-OC43, HCoV-NL63, and HCoV-HKU1) results in mild upper respiratory tract disease causing symptoms of the common cold, but three types (SARS-CoV-1, MERS-CoV, and SARS-CoV-2) can cause severe and fatal pneumonia. The human coronavirus that first occurred in China in the winter of 2002 is severe acute respiratory syndrome coronavirus 1 (SARS-CoV-1), which causes severe acute respiratory syndrome, and the main symptoms thereof are fever, malaise, muscle pain, headache, chills, etc., and cough and shortness of breath may appear. SARS-CoV-1 causes upper and lower respiratory tract infections. Currently, there is no fundamental treatment method for SARS-CoV-1, and an antibacterial agent against the causative agent of common pneumonia is administered. The main clinical symptoms of Middle East respiratory syndrome coronavirus (MERS-CoV) found in 2012 are fever, cough, and shortness of breath. Most MERS-CoV patients have severe acute respiratory tract disease (pneumonia), but some patients have mild acute upper respiratory tract disease or are asymptomatic. In particular, MERS-Cov has a high infection rate and poor prognosis in people with underlying diseases (diabetes, renal failure, chronic lung disease, or immunodeficiency disease). As of 2020, MERS-CoV outbreaks have been reported in about 27 countries. Currently, a vaccine for preventing MERS-CoV infection has not been developed worldwide, and a therapeutic agent for MERS-CoV has not been developed due to limited information on the disease.

[0146] In one embodiment of the present invention, the present invention is directed to binding molecules that are able to bind to and neutralize the coronavirus superfamily against which a preventive or therapeutic agent has not yet been developed, and the binding molecules of the present invention may also have binding affinity and/or neutralizing activity against coronaviruses, including wild-type and mutant SARS-CoV-2, and/or SARS-CoV-1, and/or MERS-CoV.

[0147] In one embodiment of the present invention, the binding molecule comprises any one binding molecule among binding molecule Nos. 1 to 190 shown in Table 1 below, or comprises a binding molecule derived therefrom. For example, for each of binding molecule Nos. 1 to 190 shown in Table 1 below, the scope of the present invention includes a binding molecule that comprises all of three light-chain CDR regions (LC CDR1, LC CDR2, and LC CDR3) and three heavy-chain CDR regions (HC CDR1, HC CDR2, and HC CDR3), or comprises a light-chain CDR region comprising at least one CDR region among the three light-chain CDR regions (LC CDR1, LC CDR2, and LC CDR3) and/or a heavy-chain CDR region comprising at least one CDR region among the three heavy-chain CDR regions (HC CDR1, HC CDR2, and HC CDR3), as long as this binding molecule achieves the purposes and effects of the present invention. In Table 1 below, No. represents each binding molecule number.

[0148] The “binding molecule that achieves the purposes and effects of the present invention” may be one satisfying the following: the minimum concentration value of the binding molecule that neutralizes 100 TCID50 of virus for SARS-coronavirus-2 (SARS-CoV-2) is preferably 2 μg/ml or less, more preferably 1 μg/ml or less, even more preferably 0.5 μg/ml or less, even more preferably 0.25 μg/ml or less, even more preferably 0.125 μg/ml or less; and/or
[0149] the binding molecule is able to bind to a receptor-binding domain (RBD) of the spike protein of SARS-coronavirus-2 (SARS-CoV-2) with an equilibrium dissociation constant (K_{D}) of preferably 1.0×10⁻⁸M or less, more preferably 1.0×10⁻⁹M or less, even more preferably 1.0×10⁻¹⁰ M or less; and/or
[0150] the binding molecule has an IC₅₀ value of preferably 200 ng/ml or less, more preferably 100 ng/ml or less, even more preferably 50 ng/ml or less, even more preferably 25 ng/ml or less, even more preferably 10 ng/ml or less, as evaluated according to a plaque reduction neutralization test (PRNT) method for SARS-coronavirus-2 (SARS-CoV-2), without being limited thereto. Here, IC₅₀ value is the antibody concentration at which the antibody exhibits 50% of neutralizing activity against the virus.

[0151] In another embodiment of the present invention, the binding molecule comprises any one binding molecule selected from the group consisting of binding molecule Nos. 2, 3, 12, 15, 16, 18, 19, 20, 22, 23, 24, 26, 31, 32, 33, 34, 37, 43, 45, 48, 50, 51, 53, 54, 55, 56, 59, 60, 61, 66, 69, 74, 75, 76, 81, 82, 83, 85, 86, 87, 93, 94, 95, 96, 98, 102, 103, 104 and 108 among the binding molecules shown in Table 1 below, or a binding molecule derived therefrom. That is, for each of the above binding molecule numbers, the scope of the present invention includes a binding molecule that comprises all of three light-chain CDR regions (LC CDR1, LC CDR2, and LC CDR3) and three heavy-chain CDR regions (HC CDR1, HC CDR2, and HC CDR3), or comprises a light-chain CDR region comprising at least one CDR region among the three light-chain CDR regions (LC CDR1, LC CDR2, and LC CDR3) and/or a heavy-chain CDR region comprising at least one CDR region among the three heavy-chain CDR regions (HC CDR1, HC CDR2, and HC CDR3), as long as this binding molecule achieves the purposes and effects of the present invention.

[0152] In another embodiment, the binding molecule comprises any one binding molecule selected from the group consisting of binding molecule Nos. 2, 32, 59, 95, 102 and 103 among the binding molecules shown in Table 1 below, or a binding molecule derived therefrom. That is, for each of the above binding molecule numbers, the scope of the present invention includes a binding molecule that comprises all of three light-chain CDR regions (LC CDR1, LC CDR2, and LC CDR3) and three heavy-chain CDR regions (HC CDR1, HC CDR2, and HC CDR3), or comprises a light-chain CDR region comprising at least one CDR region among the three light-chain CDR regions (LC CDR1, LC CDR2, and LC CDR3) and/or a heavy-chain CDR region comprising at least one CDR region among the three heavy-chain CDR regions (HC CDR1, HC CDR2, and HC CDR3), as long as this binding molecule achieves the purposes and effects of the present invention.

[0153] In another embodiment, the binding molecule comprises any one binding molecule selected from the group consisting of binding molecule Nos. 32, 33, 34, 37, 45, 48, 53, 54, 59, 61 and 81 among the binding molecules shown in Table 1 below, or a binding molecule derived therefrom. That is, for each of the above binding molecule numbers, the scope of the present invention includes a binding molecule that comprises all of three light-chain CDR regions (LC CDR1, LC CDR2, and LC CDR3) and three heavy-chain CDR regions (HC CDR1, HC CDR2, and HC CDR3), or comprises a light-chain CDR region comprising at least one CDR region among the three light-chain CDR regions (LC CDR1, LC CDR2, and LC CDR3) and/or a heavy-chain CDR region comprising at least one CDR region among the three heavy-chain CDR regions (HC CDR1, HC CDR2, and HC CDR3), as long as this binding molecule achieves the purposes and effects of the present invention.

[0154] In another embodiment, the binding molecule comprises any one binding molecule selected from the group consisting of binding molecule Nos. 32, 34, 37, 45 and 54 among the binding molecules shown in Table 1 below, or a binding molecule derived therefrom. That is, for each of the above binding molecule numbers, the scope of the present invention includes a binding molecule that comprises all of three light-chain CDR regions (LC CDR1, LC CDR2, and LC CDR3) and three heavy-chain CDR regions (HC CDR1, HC CDR2, and HC CDR3), or comprises a light-chain CDR region comprising at least one CDR region among the three light-chain CDR regions (LC CDR1, LC CDR2, and LC CDR3) and/or a heavy-chain CDR region comprising at least one CDR region among the three heavy-chain CDR regions (HC CDR1, HC CDR2, and HC CDR3), as long as this binding molecule achieves the purposes and effects of the present invention.

[0155] In another embodiment, the binding molecule comprises any one binding molecule selected from the group consisting of binding molecule Nos. 32 and 54 among the binding molecules shown in Table 1 below, or a binding molecule derived therefrom. That is, for each of the above binding molecule numbers, the scope of the present invention includes a binding molecule that comprises all of three light-chain CDR regions (LC CDR1, LC CDR2, and LC CDR3) and three heavy-chain CDR regions (HC CDR1, HC CDR2, and HC CDR3), or comprises a light-chain CDR region comprising at least one CDR region among the three light-chain CDR regions (LC CDR1, LC CDR2, and LC CDR3) and/or a heavy-chain CDR region comprising at least one CDR region among the three heavy-chain CDR regions (HC CDR1, HC CDR2, and HC CDR3), as long as this binding molecule achieves the purposes and effects of the present invention.

[0156] In another embodiment, the binding molecule may be the binding molecule of binding molecule No. 32 among the binding molecules shown in Table 1 below, or a binding molecule derived therefrom. That is, for binding molecule No. 32, the scope of the present invention includes a binding molecule that comprises all of three light-chain CDR regions (LC CDR1, LC CDR2, and LC CDR3) and three heavy-chain CDR regions (HC CDR1, HC CDR2, and HC CDR3), or comprises a light-chain CDR region comprising at least one CDR region among the three light-chain CDR regions (LC CDR1, LC CDR2, and LC CDR3) and/or a heavy-chain CDR region comprising at least one CDR region among the three heavy-chain CDR regions (HC CDR1, HC CDR2, and HC CDR3), as long as this binding molecule achieves the purposes and effects of the present invention.

TABLE 1

| No. | SEQID | LC CDR1 | SEQID | LC CDR2 | SEQID | LC CDR3 | SEQID | HC CDR1 | SEQID | HC CDR2 | SEQID | HC CDR3 |
|---|---|---|---|---|---|---|---|---|---|---|---|---|
| 1 | [symbol] | [symbol] | [symbol] | [symbol] | [symbol] | [symbol] | [symbol] | [symbol] | [symbol] | [symbol] | [symbol] | [symbol] |
| 2 | [symbol] | [symbol] | [symbol] | [symbol] | [symbol] | [symbol] | [symbol] | [symbol] | [symbol] | [symbol] | [symbol] | [symbol] |
| 3 | [symbol] | [symbol] | [symbol] | [symbol] | [symbol] | [symbol] | [symbol] | [symbol] | [symbol] | [symbol] | [symbol] | [symbol] |
| 4 | [symbol] | [symbol] | [symbol] | [symbol] | [symbol] | [symbol] | [symbol] | [symbol] | [symbol] | [symbol] | [symbol] | [symbol] |
| 5 | [symbol] | [symbol] | [symbol] | [symbol] | [symbol] | [symbol] | [symbol] | [symbol] | [symbol] | [symbol] | [symbol] | [symbol] |
| 6 | [symbol] | [symbol] | [symbol] | [symbol] | [symbol] | [symbol] | [symbol] | [symbol] | [symbol] | [symbol] | [symbol] | [symbol] |
| 7 | [symbol] | [symbol] | [symbol] | [symbol] | [symbol] | [symbol] | [symbol] | [symbol] | [symbol] | [symbol] | [symbol] | [symbol] |
| 8 | [symbol] | [symbol] | [symbol] | [symbol] | [symbol] | [symbol] | [symbol] | [symbol] | [symbol] | [symbol] | [symbol] | [symbol] |
| 9 | [symbol] | [symbol] | [symbol] | [symbol] | [symbol] | [symbol] | [symbol] | [symbol] | [symbol] | [symbol] | [symbol] | [symbol] |
| 10 | [symbol] | [symbol] | [symbol] | [symbol] | [symbol] | [symbol] | [symbol] | [symbol] | [symbol] | [symbol] | [symbol] | [symbol] |
| 11 | [symbol] | [symbol] | [symbol] | [symbol] | [symbol] | [symbol] | [symbol] | [symbol] | [symbol] | [symbol] | [symbol] | [symbol] |
| 12 | [symbol] | [symbol] | [symbol] | [symbol] | [symbol] | [symbol] | [symbol] | [symbol] | [symbol] | [symbol] | [symbol] | [symbol] |
| 13 | [symbol] | [symbol] | [symbol] | [symbol] | [symbol] | [symbol] | [symbol] | [symbol] | [symbol] | [symbol] | [symbol] | [symbol] |
| 14 | [symbol] | [symbol] | [symbol] | [symbol] | [symbol] | [symbol] | [symbol] | [symbol] | [symbol] | [symbol] | [symbol] | [symbol] |
| 15 | [symbol] | [symbol] | [symbol] | [symbol] | [symbol] | [symbol] | [symbol] | [symbol] | [symbol] | [symbol] | [symbol] | [symbol] |
| 16 | [symbol] | [symbol] | [symbol] | [symbol] | [symbol] | [symbol] | [symbol] | [symbol] | [symbol] | [symbol] | [symbol] | [symbol] |
| 17 | [symbol] | [symbol] | [symbol] | [symbol] | [symbol] | [symbol] | [symbol] | [symbol] | [symbol] | [symbol] | [symbol] | [symbol] |
| 18 | [symbol] | [symbol] | [symbol] | [symbol] | [symbol] | [symbol] | [symbol] | [symbol] | [symbol] | [symbol] | [symbol] | [symbol] |
| 19 | [symbol] | [symbol] | [symbol] | [symbol] | [symbol] | [symbol] | [symbol] | [symbol] | [symbol] | [symbol] | [symbol] | [symbol] |
| 20 | [symbol] | [symbol] | [symbol] | [symbol] | [symbol] | [symbol] | [symbol] | [symbol] | [symbol] | [symbol] | [symbol] | [symbol] |
| 21 | [symbol] | [symbol] | [symbol] | [symbol] | [symbol] | [symbol] | [symbol] | [symbol] | [symbol] | [symbol] | [symbol] | [symbol] |
| 22 | [symbol] | [symbol] | [symbol] | [symbol] | [symbol] | [symbol] | [symbol] | [symbol] | [symbol] | [symbol] | [symbol] | [symbol] |
| 23 | [symbol] | [symbol] | [symbol] | [symbol] | [symbol] | [symbol] | [symbol] | [symbol] | [symbol] | [symbol] | [symbol] | [symbol] |
| 24 | [symbol] | [symbol] | [symbol] | [symbol] | [symbol] | [symbol] | [symbol] | [symbol] | [symbol] | [symbol] | [symbol] | [symbol] |
| 25 | [symbol] | [symbol] | [symbol] | [symbol] | [symbol] | [symbol] | [symbol] | [symbol] | [symbol] | [symbol] | [symbol] | [symbol] |
| 26 | [symbol] | [symbol] | [symbol] | [symbol] | [symbol] | [symbol] | [symbol] | [symbol] | [symbol] | [symbol] | [symbol] | [symbol] |
| 27 | [symbol] | [symbol] | [symbol] | [symbol] | [symbol] | [symbol] | [symbol] | [symbol] | [symbol] | [symbol] | [symbol] | [symbol] |
| 28 | [symbol] | [symbol] | [symbol] | [symbol] | [symbol] | [symbol] | [symbol] | [symbol] | [symbol] | [symbol] | [symbol] | [symbol] |
| 29 | [symbol] | [symbol] | [symbol] | [symbol] | [symbol] | [symbol] | [symbol] | [symbol] | [symbol] | [symbol] | [symbol] | [symbol] |
| 30 | [symbol] | [symbol] | [symbol] | [symbol] | [symbol] | [symbol] | [symbol] | [symbol] | [symbol] | [symbol] | [symbol] | [symbol] |
| 31 | [symbol] | [symbol] | [symbol] | [symbol] | [symbol] | [symbol] | [symbol] | [symbol] | [symbol] | [symbol] | [symbol] | [symbol] |
| 32 | [symbol] | [symbol] | [symbol] | [symbol] | [symbol] | [symbol] | [symbol] | [symbol] | [symbol] | [symbol] | [symbol] | [symbol] |
| 33 | [symbol] | [symbol] | [symbol] | [symbol] | [symbol] | [symbol] | [symbol] | [symbol] | [symbol] | [symbol] | [symbol] | [symbol] |
| 34 | [symbol] | [symbol] | [symbol] | [symbol] | [symbol] | [symbol] | [symbol] | [symbol] | [symbol] | [symbol] | [symbol] | [symbol] |
| 35 | [symbol] | [symbol] | [symbol] | [symbol] | [symbol] | [symbol] | [symbol] | [symbol] | [symbol] | [symbol] | [symbol] | [symbol] |
| 36 | [symbol] | [symbol] | [symbol] | [symbol] | [symbol] | [symbol] | [symbol] | [symbol] | [symbol] | [symbol] | [symbol] | [symbol] |
| 37 | [symbol] | [symbol] | [symbol] | [symbol] | [symbol] | [symbol] | [symbol] | [symbol] | [symbol] | [symbol] | [symbol] | [symbol] |
| 38 | [symbol] | [symbol] | [symbol] | [symbol] | [symbol] | [symbol] | [symbol] | [symbol] | [symbol] | [symbol] | [symbol] | [symbol] |
| 39 | [symbol] | [symbol] | [symbol] | [symbol] | [symbol] | [symbol] | [symbol] | [symbol] | [symbol] | [symbol] | [symbol] | [symbol] |
| 40 | [symbol] | [symbol] | [symbol] | [symbol] | [symbol] | [symbol] | [symbol] | [symbol] | [symbol] | [symbol] | [symbol] | [symbol] |
| 41 | [symbol] | [symbol] | [symbol] | [symbol] | [symbol] | [symbol] | [symbol] | [symbol] | [symbol] | [symbol] | [symbol] | [symbol] |
| 42 | [symbol] | [symbol] | [symbol] | [symbol] | [symbol] | [symbol] | [symbol] | [symbol] | [symbol] | [symbol] | [symbol] | [symbol] |
| 43 | [symbol] | [symbol] | [symbol] | [symbol] | [symbol] | [symbol] | [symbol] | [symbol] | [symbol] | [symbol] | [symbol] | [symbol] |
| 44 | [symbol] | [symbol] | [symbol] | [symbol] | [symbol] | [symbol] | [symbol] | [symbol] | [symbol] | [symbol] | [symbol] | [symbol] |
| 45 | [symbol] | [symbol] | [symbol] | [symbol] | [symbol] | [symbol] | [symbol] | [symbol] | [symbol] | [symbol] | [symbol] | [symbol] |
| 46 | [symbol] | [symbol] | [symbol] | [symbol] | [symbol] | [symbol] | [symbol] | [symbol] | [symbol] | [symbol] | [symbol] | [symbol] |
| 47 | [symbol] | [symbol] | [symbol] | [symbol] | [symbol] | [symbol] | [symbol] | [symbol] | [symbol] | [symbol] | [symbol] | [symbol] |
| 48 | [symbol] | [symbol] | [symbol] | [symbol] | [symbol] | [symbol] | [symbol] | [symbol] | [symbol] | [symbol] | [symbol] | [symbol] |
| 49 | [symbol] | [symbol] | [symbol] | [symbol] | [symbol] | [symbol] | [symbol] | [symbol] | [symbol] | [symbol] | [symbol] | [symbol] |
| 50 | [symbol] | [symbol] | [symbol] | [symbol] | [symbol] | [symbol] | [symbol] | [symbol] | [symbol] | [symbol] | [symbol] | [symbol] |
| 51 | [symbol] | [symbol] | [symbol] | [symbol] | [symbol] | [symbol] | [symbol] | [symbol] | [symbol] | [symbol] | [symbol] | [symbol] |
| 52 | [symbol] | [symbol] | [symbol] | [symbol] | [symbol] | [symbol] | [symbol] | [symbol] | [symbol] | [symbol] | [symbol] | [symbol] |
| 53 | [symbol] | [symbol] | [symbol] | [symbol] | [symbol] | [symbol] | [symbol] | [symbol] | [symbol] | [symbol] | [symbol] | [symbol] |
| 54 | [symbol] | [symbol] | [symbol] | [symbol] | [symbol] | [symbol] | [symbol] | [symbol] | [symbol] | [symbol] | [symbol] | [symbol] |
| 55 | [symbol] | [symbol] | [symbol] | [symbol] | [symbol] | [symbol] | [symbol] | [symbol] | [symbol] | [symbol] | [symbol] | [symbol] |
| 56 | [symbol] | [symbol] | [symbol] | [symbol] | [symbol] | [symbol] | [symbol] | [symbol] | [symbol] | [symbol] | [symbol] | [symbol] |
| 57 | [symbol] | [symbol] | [symbol] | [symbol] | [symbol] | [symbol] | [symbol] | [symbol] | [symbol] | [symbol] | [symbol] | [symbol] |
| 58 | [symbol] | [symbol] | [symbol] | [symbol] | [symbol] | [symbol] | [symbol] | [symbol] | [symbol] | [symbol] | [symbol] | [symbol] |
| 59 | [symbol] | [symbol] | [symbol] | [symbol] | [symbol] | [symbol] | [symbol] | [symbol] | [symbol] | [symbol] | [symbol] | [symbol] |
| 60 | [symbol] | [symbol] | [symbol] | [symbol] | [symbol] | [symbol] | [symbol] | [symbol] | [symbol] | [symbol] | [symbol] | [symbol] |
| 61 | [symbol] | [symbol] | [symbol] | [symbol] | [symbol] | [symbol] | [symbol] | [symbol] | [symbol] | [symbol] | [symbol] | [symbol] |
| 62 | [symbol] | [symbol] | [symbol] | [symbol] | [symbol] | [symbol] | [symbol] | [symbol] | [symbol] | [symbol] | [symbol] | [symbol] |
| 63 | [symbol] | [symbol] | [symbol] | [symbol] | [symbol] | [symbol] | [symbol] | [symbol] | [symbol] | [symbol] | [symbol] | [symbol] |
| 64 | [symbol] | [symbol] | [symbol] | [symbol] | [symbol] | [symbol] | [symbol] | [symbol] | [symbol] | [symbol] | [symbol] | [symbol] |
| 65 | [symbol] | [symbol] | [symbol] | [symbol] | [symbol] | [symbol] | [symbol] | [symbol] | [symbol] | [symbol] | [symbol] | [symbol] |
| 66 | [symbol] | [symbol] | [symbol] | [symbol] | [symbol] | [symbol] | [symbol] | [symbol] | [symbol] | [symbol] | [symbol] | [symbol] |
| 67 | [symbol] | [symbol] | [symbol] | [symbol] | [symbol] | [symbol] | [symbol] | [symbol] | [symbol] | [symbol] | [symbol] | [symbol] |
| 68 | [symbol] | [symbol] | [symbol] | [symbol] | [symbol] | [symbol] | [symbol] | [symbol] | [symbol] | [symbol] | [symbol] | [symbol] |
| 69 | [symbol] | [symbol] | [symbol] | [symbol] | [symbol] | [symbol] | [symbol] | [symbol] | [symbol] | [symbol] | [symbol] | [symbol] |
| 70 | [symbol] | [symbol] | [symbol] | [symbol] | [symbol] | [symbol] | [symbol] | [symbol] | [symbol] | [symbol] | [symbol] | [symbol] |
| 71 | [symbol] | [symbol] | [symbol] | [symbol] | [symbol] | [symbol] | [symbol] | [symbol] | [symbol] | [symbol] | [symbol] | [symbol] |
| 72 | [symbol] | [symbol] | [symbol] | [symbol] | [symbol] | [symbol] | [symbol] | [symbol] | [symbol] | [symbol] | [symbol] | [symbol] |
| 73 | [symbol] | [symbol] | [symbol] | [symbol] | [symbol] | [symbol] | [symbol] | [symbol] | [symbol] | [symbol] | [symbol] | [symbol] |
| 74 | [symbol] | [symbol] | [symbol] | [symbol] | [symbol] | [symbol] | [symbol] | [symbol] | [symbol] | [symbol] | [symbol] | [symbol] |
| 75 | [symbol] | [symbol] | [symbol] | [symbol] | [symbol] | [symbol] | [symbol] | [symbol] | [symbol] | [symbol] | [symbol] | [symbol] |
| 76 | [symbol] | [symbol] | [symbol] | [symbol] | [symbol] | [symbol] | [symbol] | [symbol] | [symbol] | [symbol] | [symbol] | [symbol] |
| 77 | [symbol] | [symbol] | [symbol] | [symbol] | [symbol] | [symbol] | [symbol] | [symbol] | [symbol] | [symbol] | [symbol] | [symbol] |
| 78 | [symbol] | [symbol] | [symbol] | [symbol] | [symbol] | [symbol] | [symbol] | [symbol] | [symbol] | [symbol] | [symbol] | [symbol] |
| 79 | [symbol] | [symbol] | [symbol] | [symbol] | [symbol] | [symbol] | [symbol] | [symbol] | [symbol] | [symbol] | [symbol] | [symbol] |
| 80 | [symbol] | [symbol] | [symbol] | [symbol] | [symbol] | [symbol] | [symbol] | [symbol] | [symbol] | [symbol] | [symbol] | [symbol] |
| 81 | [symbol] | [symbol] | [symbol] | [symbol] | [symbol] | [symbol] | [symbol] | [symbol] | [symbol] | [symbol] | [symbol] | [symbol] |
| 82 | [symbol] | [symbol] | [symbol] | [symbol] | [symbol] | [symbol] | [symbol] | [symbol] | [symbol] | [symbol] | [symbol] | [symbol] |
| 83 | [symbol] | [symbol] | [symbol] | [symbol] | [symbol] | [symbol] | [symbol] | [symbol] | [symbol] | [symbol] | [symbol] | [symbol] |
| 84 | [symbol] | [symbol] | [symbol] | [symbol] | [symbol] | [symbol] | [symbol] | [symbol] | [symbol] | [symbol] | [symbol] | [symbol] |
| 85 | [symbol] | [symbol] | [symbol] | [symbol] | [symbol] | [symbol] | [symbol] | [symbol] | [symbol] | [symbol] | [symbol] | [symbol] |
| 86 | [symbol] | [symbol] | [symbol] | [symbol] | [symbol] | [symbol] | [symbol] | [symbol] | [symbol] | [symbol] | [symbol] | [symbol] |
| 87 | [symbol] | [symbol] | [symbol] | [symbol] | [symbol] | [symbol] | [symbol] | [symbol] | [symbol] | [symbol] | [symbol] | [symbol] |
| 88 | [symbol] | [symbol] | [symbol] | [symbol] | [symbol] | [symbol] | [symbol] | [symbol] | [symbol] | [symbol] | [symbol] | [symbol] |
| 89 | [symbol] | [symbol] | [symbol] | [symbol] | [symbol] | [symbol] | [symbol] | [symbol] | [symbol] | [symbol] | [symbol] | [symbol] |
| 90 | [symbol] | [symbol] | [symbol] | [symbol] | [symbol] | [symbol] | [symbol] | [symbol] | [symbol] | [symbol] | [symbol] | [symbol] |
| 91 | [symbol] | [symbol] | [symbol] | [symbol] | [symbol] | [symbol] | [symbol] | [symbol] | [symbol] | [symbol] | [symbol] | [symbol] |
| 92 | [symbol] | [symbol] | [symbol] | [symbol] | [symbol] | [symbol] | [symbol] | [symbol] | [symbol] | [symbol] | [symbol] | [symbol] |
| 93 | [symbol] | [symbol] | [symbol] | [symbol] | [symbol] | [symbol] | [symbol] | [symbol] | [symbol] | [symbol] | [symbol] | [symbol] |
| 94 | [symbol] | [symbol] | [symbol] | [symbol] | [symbol] | [symbol] | [symbol] | [symbol] | [symbol] | [symbol] | [symbol] | [symbol] |
| 95 | [symbol] | [symbol] | [symbol] | [symbol] | [symbol] | [symbol] | [symbol] | [symbol] | [symbol] | [symbol] | [symbol] | [symbol] |
| 96 | [symbol] | [symbol] | [symbol] | [symbol] | [symbol] | [symbol] | [symbol] | [symbol] | [symbol] | [symbol] | [symbol] | [symbol] |
| 97 | [symbol] | [symbol] | [symbol] | [symbol] | [symbol] | [symbol] | [symbol] | [symbol] | [symbol] | [symbol] | [symbol] | [symbol] |
| 98 | [symbol] | [symbol] | [symbol] | [symbol] | [symbol] | [symbol] | [symbol] | [symbol] | [symbol] | [symbol] | [symbol] | [symbol] |
| 99 | [symbol] | [symbol] | [symbol] | [symbol] | [symbol] | [symbol] | [symbol] | [symbol] | [symbol] | [symbol] | [symbol] | [symbol] |
| 100 | [symbol] | [symbol] | [symbol] | [symbol] | [symbol] | [symbol] | [symbol] | [symbol] | [symbol] | [symbol] | [symbol] | [symbol] |
| 101 | [symbol] | [symbol] | [symbol] | [symbol] | [symbol] | [symbol] | [symbol] | [symbol] | [symbol] | [symbol] | [symbol] | [symbol] |
| 102 | [symbol] | [symbol] | [symbol] | [symbol] | [symbol] | [symbol] | [symbol] | [symbol] | [symbol] | [symbol] | [symbol] | [symbol] |
| 103 | [symbol] | [symbol] | [symbol] | [symbol] | [symbol] | [symbol] | [symbol] | [symbol] | [symbol] | [symbol] | [symbol] | [symbol] |
| 104 | [symbol] | [symbol] | [symbol] | [symbol] | [symbol] | [symbol] | [symbol] | [symbol] | [symbol] | [symbol] | [symbol] | [symbol] |
| 105 | [symbol] | [symbol] | [symbol] | [symbol] | [symbol] | [symbol] | [symbol] | [symbol] | [symbol] | [symbol] | [symbol] | [symbol] |
| 106 | [symbol] | [symbol] | [symbol] | [symbol] | [symbol] | [symbol] | [symbol] | [symbol] | [symbol] | [symbol] | [symbol] | [symbol] |
| 107 | [symbol] | [symbol] | [symbol] | [symbol] | [symbol] | [symbol] | [symbol] | [symbol] | [symbol] | [symbol] | [symbol] | [symbol] |
| 108 | [symbol] | [symbol] | [symbol] | [symbol] | [symbol] | [symbol] | [symbol] | [symbol] | [symbol] | [symbol] | [symbol] | [symbol] |
| 109 | [symbol] | [symbol] | [symbol] | [symbol] | [symbol] | [symbol] | [symbol] | [symbol] | [symbol] | [symbol] | [symbol] | [symbol] |
| 110 | [symbol] | [symbol] | [symbol] | [symbol] | [symbol] | [symbol] | [symbol] | [symbol] | [symbol] | [symbol] | [symbol] | [symbol] |
| 111 | [symbol] | [symbol] | [symbol] | [symbol] | [symbol] | [symbol] | [symbol] | [symbol] | [symbol] | [symbol] | [symbol] | [symbol] |
| 112 | [symbol] | [symbol] | [symbol] | [symbol] | [symbol] | [symbol] | [symbol] | [symbol] | [symbol] | [symbol] | [symbol] | [symbol] |
| 113 | [symbol] | [symbol] | [symbol] | [symbol] | [symbol] | [symbol] | [symbol] | [symbol] | [symbol] | [symbol] | [symbol] | [symbol] |
| 114 | [symbol] | [symbol] | [symbol] | [symbol] | [symbol] | [symbol] | [symbol] | [symbol] | [symbol] | [symbol] | [symbol] | [symbol] |
| 115 | [symbol] | [symbol] | [symbol] | [symbol] | [symbol] | [symbol] | [symbol] | [symbol] | [symbol] | [symbol] | [symbol] | [symbol] |
| 116 | [symbol] | [symbol] | [symbol] | [symbol] | [symbol] | [symbol] | [symbol] | [symbol] | [symbol] | [symbol] | [symbol] | [symbol] |
| 117 | [symbol] | [symbol] | [symbol] | [symbol] | [symbol] | [symbol] | [symbol] | [symbol] | [symbol] | [symbol] | [symbol] | [symbol] |
| 118 | [symbol] | [symbol] | [symbol] | [symbol] | [symbol] | [symbol] | [symbol] | [symbol] | [symbol] | [symbol] | [symbol] | [symbol] |
| 119 | [symbol] | [symbol] | [symbol] | [symbol] | [symbol] | [symbol] | [symbol] | [symbol] | [symbol] | [symbol] | [symbol] | [symbol] |
| 120 | [symbol] | [symbol] | [symbol] | [symbol] | [symbol] | [symbol] | [symbol] | [symbol] | [symbol] | [symbol] | [symbol] | [symbol] |
| 121 | [symbol] | [symbol] | [symbol] | [symbol] | [symbol] | [symbol] | [symbol] | [symbol] | [symbol] | [symbol] | [symbol] | [symbol] |
| 122 | [symbol] | [symbol] | [symbol] | [symbol] | [symbol] | [symbol] | [symbol] | [symbol] | [symbol] | [symbol] | [symbol] | [symbol] |
| 123 | [symbol] | [symbol] | [symbol] | [symbol] | [symbol] | [symbol] | [symbol] | [symbol] | [symbol] | [symbol] | [symbol] | [symbol] |
| 124 | [symbol] | [symbol] | [symbol] | [symbol] | [symbol] | [symbol] | [symbol] | [symbol] | [symbol] | [symbol] | [symbol] | [symbol] |
| 125 | [symbol] | [symbol] | [symbol] | [symbol] | [symbol] | [symbol] | [symbol] | [symbol] | [symbol] | [symbol] | [symbol] | [symbol] |
| 126 | [symbol] | [symbol] | [symbol] | [symbol] | [symbol] | [symbol] | [symbol] | [symbol] | [symbol] | [symbol] | [symbol] | [symbol] |
| 127 | [symbol] | [symbol] | [symbol] | [symbol] | [symbol] | [symbol] | [symbol] | [symbol] | [symbol] | [symbol] | [symbol] | [symbol] |
| 128 | [symbol] | [symbol] | [symbol] | [symbol] | [symbol] | [symbol] | [symbol] | [symbol] | [symbol] | [symbol] | [symbol] | [symbol] |
| 129 | [symbol] | [symbol] | [symbol] | [symbol] | [symbol] | [symbol] | [symbol] | [symbol] | [symbol] | [symbol] | [symbol] | [symbol] |
| 130 | [symbol] | [symbol] | [symbol] | [symbol] | [symbol] | [symbol] | [symbol] | [symbol] | [symbol] | [symbol] | [symbol] | [symbol] |
| 131 | [symbol] | [symbol] | [symbol] | [symbol] | [symbol] | [symbol] | [symbol] | [symbol] | [symbol] | [symbol] | [symbol] | [symbol] |
| 132 | [symbol] | [symbol] | [symbol] | [symbol] | [symbol] | [symbol] | [symbol] | [symbol] | [symbol] | [symbol] | [symbol] | [symbol] |
| 133 | [symbol] | [symbol] | [symbol] | [symbol] | [symbol] | [symbol] | [symbol] | [symbol] | [symbol] | [symbol] | [symbol] | [symbol] |
| 134 | [symbol] | [symbol] | [symbol] | [symbol] | [symbol] | [symbol] | [symbol] | [symbol] | [symbol] | [symbol] | [symbol] | [symbol] |
| 135 | [symbol] | [symbol] | [symbol] | [symbol] | [symbol] | [symbol] | [symbol] | [symbol] | [symbol] | [symbol] | [symbol] | [symbol] |
| 136 | [symbol] | [symbol] | [symbol] | [symbol] | [symbol] | [symbol] | [symbol] | [symbol] | [symbol] | [symbol] | [symbol] | [symbol] |
| 137 | [symbol] | [symbol] | [symbol] | [symbol] | [symbol] | [symbol] | [symbol] | [symbol] | [symbol] | [symbol] | [symbol] | [symbol] |
| 138 | [symbol] | [symbol] | [symbol] | [symbol] | [symbol] | [symbol] | [symbol] | [symbol] | [symbol] | [symbol] | [symbol] | [symbol] |
| 139 | [symbol] | [symbol] | [symbol] | [symbol] | [symbol] | [symbol] | [symbol] | [symbol] | [symbol] | [symbol] | [symbol] | [symbol] |
| 140 | [symbol] | [symbol] | [symbol] | [symbol] | [symbol] | [symbol] | [symbol] | [symbol] | [symbol] | [symbol] | [symbol] | [symbol] |
| 141 | [symbol] | [symbol] | [symbol] | [symbol] | [symbol] | [symbol] | [symbol] | [symbol] | [symbol] | [symbol] | [symbol] | [symbol] |
| 142 | [symbol] | [symbol] | [symbol] | [symbol] | [symbol] | [symbol] | [symbol] | [symbol] | [symbol] | [symbol] | [symbol] | [symbol] |
| 143 | [symbol] | [symbol] | [symbol] | [symbol] | [symbol] | [symbol] | [symbol] | [symbol] | [symbol] | [symbol] | [symbol] | [symbol] |
| 144 | [symbol] | [symbol] | [symbol] | [symbol] | [symbol] | [symbol] | [symbol] | [symbol] | [symbol] | [symbol] | [symbol] | [symbol] |
| 145 | [symbol] | [symbol] | [symbol] | [symbol] | [symbol] | [symbol] | [symbol] | [symbol] | [symbol] | [symbol] | [symbol] | [symbol] |
| 146 | [symbol] | [symbol] | [symbol] | [symbol] | [symbol] | [symbol] | [symbol] | [symbol] | [symbol] | [symbol] | [symbol] | [symbol] |
| 147 | [symbol] | [symbol] | [symbol] | [symbol] | [symbol] | [symbol] | [symbol] | [symbol] | [symbol] | [symbol] | [symbol] | [symbol] |
| 148 | [symbol] | [symbol] | [symbol] | [symbol] | [symbol] | [symbol] | [symbol] | [symbol] | [symbol] | [symbol] | [symbol] | [symbol] |
| 149 | [symbol] | [symbol] | [symbol] | [symbol] | [symbol] | [symbol] | [symbol] | [symbol] | [symbol] | [symbol] | [symbol] | [symbol] |
| 150 | [symbol] | [symbol] | [symbol] | [symbol] | [symbol] | [symbol] | [symbol] | [symbol] | [symbol] | [symbol] | [symbol] | [symbol] |
| 151 | [symbol] | [symbol] | [symbol] | [symbol] | [symbol] | [symbol] | [symbol] | [symbol] | [symbol] | [symbol] | [symbol] | [symbol] |
| 152 | [symbol] | [symbol] | [symbol] | [symbol] | [symbol] | [symbol] | [symbol] | [symbol] | [symbol] | [symbol] | [symbol] | [symbol] |
| 153 | [symbol] | [symbol] | [symbol] | [symbol] | [symbol] | [symbol] | [symbol] | [symbol] | [symbol] | [symbol] | [symbol] | [symbol] |
| 154 | [symbol] | [symbol] | [symbol] | [symbol] | [symbol] | [symbol] | [symbol] | [symbol] | [symbol] | [symbol] | [symbol] | [symbol] |
| 155 | [symbol] | [symbol] | [symbol] | [symbol] | [symbol] | [symbol] | [symbol] | [symbol] | [symbol] | [symbol] | [symbol] | [symbol] |
| 156 | [symbol] | [symbol] | [symbol] | [symbol] | [symbol] | [symbol] | [symbol] | [symbol] | [symbol] | [symbol] | [symbol] | [symbol] |
| 157 | [symbol] | [symbol] | [symbol] | [symbol] | [symbol] | [symbol] | [symbol] | [symbol] | [symbol] | [symbol] | [symbol] | [symbol] |
| 158 | [symbol] | [symbol] | [symbol] | [symbol] | [symbol] | [symbol] | [symbol] | [symbol] | [symbol] | [symbol] | [symbol] | [symbol] |
| 159 | [symbol] | [symbol] | [symbol] | [symbol] | [symbol] | [symbol] | [symbol] | [symbol] | [symbol] | [symbol] | [symbol] | [symbol] |
| 160 | [symbol] | [symbol] | [symbol] | [symbol] | [symbol] | [symbol] | [symbol] | [symbol] | [symbol] | [symbol] | [symbol] | [symbol] |
| 161 | [symbol] | [symbol] | [symbol] | [symbol] | [symbol] | [symbol] | [symbol] | [symbol] | [symbol] | [symbol] | [symbol] | [symbol] |
| 162 | [symbol] | [symbol] | [symbol] | [symbol] | [symbol] | [symbol] | [symbol] | [symbol] | [symbol] | [symbol] | [symbol] | [symbol] |
| 163 | [symbol] | [symbol] | [symbol] | [symbol] | [symbol] | [symbol] | [symbol] | [symbol] | [symbol] | [symbol] | [symbol] | [symbol] |
| 164 | [symbol] | [symbol] | [symbol] | [symbol] | [symbol] | [symbol] | [symbol] | [symbol] | [symbol] | [symbol] | [symbol] | [symbol] |
| 165 | [symbol] | [symbol] | [symbol] | [symbol] | [symbol] | [symbol] | [symbol] | [symbol] | [symbol] | [symbol] | [symbol] | [symbol] |
| 166 | [symbol] | [symbol] | [symbol] | [symbol] | [symbol] | [symbol] | [symbol] | [symbol] | [symbol] | [symbol] | [symbol] | [symbol] |
| 167 | [symbol] | [symbol] | [symbol] | [symbol] | [symbol] | [symbol] | [symbol] | [symbol] | [symbol] | [symbol] | [symbol] | [symbol] |
| 168 | [symbol] | [symbol] | [symbol] | [symbol] | [symbol] | [symbol] | [symbol] | [symbol] | [symbol] | [symbol] | [symbol] | [symbol] |
| 169 | [symbol] | [symbol] | [symbol] | [symbol] | [symbol] | [symbol] | [symbol] | [symbol] | [symbol] | [symbol] | [symbol] | [symbol] |
| 170 | [symbol] | [symbol] | [symbol] | [symbol] | [symbol] | [symbol] | [symbol] | [symbol] | [symbol] | [symbol] | [symbol] | [symbol] |
| 171 | [symbol] | [symbol] | [symbol] | [symbol] | [symbol] | [symbol] | [symbol] | [symbol] | [symbol] | [symbol] | [symbol] | [symbol] |
| 172 | [symbol] | [symbol] | [symbol] | [symbol] | [symbol] | [symbol] | [symbol] | [symbol] | [symbol] | [symbol] | [symbol] | [symbol] |
| 173 | [symbol] | [symbol] | [symbol] | [symbol] | [symbol] | [symbol] | [symbol] | [symbol] | [symbol] | [symbol] | [symbol] | [symbol] |
| 174 | [symbol] | [symbol] | [symbol] | [symbol] | [symbol] | [symbol] | [symbol] | [symbol] | [symbol] | [symbol] | [symbol] | [symbol] |
| 175 | [symbol] | [symbol] | [symbol] | [symbol] | [symbol] | [symbol] | [symbol] | [symbol] | [symbol] | [symbol] | [symbol] | [symbol] |
| 176 | [symbol] | [symbol] | [symbol] | [symbol] | [symbol] | [symbol] | [symbol] | [symbol] | [symbol] | [symbol] | [symbol] | [symbol] |
| 177 | [symbol] | [symbol] | [symbol] | [symbol] | [symbol] | [symbol] | [symbol] | [symbol] | [symbol] | [symbol] | [symbol] | [symbol] |
| 178 | [symbol] | [symbol] | [symbol] | [symbol] | [symbol] | [symbol] | [symbol] | [symbol] | [symbol] | [symbol] | [symbol] | [symbol] |
| 179 | [symbol] | [symbol] | [symbol] | [symbol] | [symbol] | [symbol] | [symbol] | [symbol] | [symbol] | [symbol] | [symbol] | [symbol] |
| 180 | [symbol] | [symbol] | [symbol] | [symbol] | [symbol] | [symbol] | [symbol] | [symbol] | [symbol] | [symbol] | [symbol] | [symbol] |
| 181 | [symbol] | [symbol] | [symbol] | [symbol] | [symbol] | [symbol] | [symbol] | [symbol] | [symbol] | [symbol] | [symbol] | [symbol] |
| 182 | [symbol] | [symbol] | [symbol] | [symbol] | [symbol] | [symbol] | [symbol] | [symbol] | [symbol] | [symbol] | [symbol] | [symbol] |
| 183 | [symbol] | [symbol] | [symbol] | [symbol] | [symbol] | [symbol] | [symbol] | [symbol] | [symbol] | [symbol] | [symbol] | [symbol] |
| 184 | [symbol] | [symbol] | [symbol] | [symbol] | [symbol] | [symbol] | [symbol] | [symbol] | [symbol] | [symbol] | [symbol] | [symbol] |
| 185 | [symbol] | [symbol] | [symbol] | [symbol] | [symbol] | [symbol] | [symbol] | [symbol] | [symbol] | [symbol] | [symbol] | [symbol] |
| 186 | [symbol] | [symbol] | [symbol] | [symbol] | [symbol] | [symbol] | [symbol] | [symbol] | [symbol] | [symbol] | [symbol] | [symbol] |
| 187 | [symbol] | [symbol] | [symbol] | [symbol] | [symbol] | [symbol] | [symbol] | [symbol] | [symbol] | [symbol] | [symbol] | [symbol] |
| 188 | [symbol] | [symbol] | [symbol] | [symbol] | [symbol] | [symbol] | [symbol] | [symbol] | [symbol] | [symbol] | [symbol] | [symbol] |
| 189 | [symbol] | [symbol] | [symbol] | [symbol] | [symbol] | [symbol] | [symbol] | [symbol] | [symbol] | [symbol] | [symbol] | [symbol] |
| 190 | [symbol] | [symbol] | [symbol] | [symbol] | [symbol] | [symbol] | [symbol] | [symbol] | [symbol] | [symbol] | [symbol] | [symbol] |

[symbol]

indicates data missing or illegible when filed

[0157] In the present invention, CDRs of variable regions were determined through a conventional method using a system devised by Kabat et al. (see Kabat et al., Sequences of Proteins of Immunological Interest (5^{th}), National Institutes of Health, Bethesda, MD. (1991)). The CDR numbering used in the present invention is determined using the Kabat method, but the present invention also encompasses binding molecules comprising CDRs determined through other methods such as an IMGT method, Chothia method, AbM method, or the like. For example, as shown in Table 2 below, as binding molecules comprising three light-chain CDR regions (LC CDR1, LC CDR2, and LC CDR3) contained in the light-chain (LC) variable region and three heavy-chain CDR regions (HC CDR1, HC CDR2, and HC CDR3) contained in the heavy-chain (HC) variable region, binding molecules comprising CDRs determined through a Kabat method, an IMGT method, a Chothia method and/or an AbM method are included within the scope of the present invention.

[0158] In one embodiment of the present invention, the binding molecule comprises any one binding molecule selected from the group consisting of binding molecules Nos. 1 to 190 shown in Table 2 below, or comprises a binding molecule derived therefrom. In Table 2 below, No. represents each binding molecule number.

[0159] In another embodiment of the present invention, the binding molecule may be any one selected from the group consisting of binding molecule Nos. 2, 3, 12, 15, 16, 18, 19, 20, 22, 23, 24, 26, 31, 32, 33, 34, 37, 43, 45, 48, 50, 51, 53, 54, 55, 56, 59, 60, 61, 66, 69, 74, 75, 76, 81, 82, 83, 85, 86, 87, 93, 94, 95, 96, 98, 102, 103, 104 and 108 among the binding molecules shown in Table 2 below, or may be a binding molecule comprising a sequence derived therefrom.

[0160] In another embodiment of the present invention, the binding molecule may be any one selected from the group consisting of binding molecule Nos. 2, 32, 59, 95, 102 and 103 among the binding molecules shown in Table 2 below, or may be a binding molecule comprising a sequence derived therefrom.

[0161] In another embodiment of the present invention, the binding molecule may be any one selected from the group consisting of binding molecule Nos. 32, 33, 34, 37, 45, 48, 53, 54, 59, 61 and 81 among the binding molecules shown in Table 2 below, or may be a binding molecule comprising a sequence derived therefrom.

[0162] In another embodiment of the present invention, the binding molecule may be any one selected from the group consisting of binding molecule Nos. 32, 34, 37, 45 and 54 among the binding molecules shown in Table 2 below, or may be a binding molecule comprising a sequence derived therefrom.

[0163] In another embodiment of the present invention, the binding molecule may be any one selected from the group consisting of binding molecule Nos. 32 and 54 among the binding molecules shown in Table 2 below, or may be a binding molecule comprising the same.

[0164] In another embodiment of the present invention, the binding molecule may be the binding molecule of binding molecule No. 32 among the binding molecules shown in Table 2 below.

TABLE 2

| No. | SEQID | LC variable region | SEQID | HC variable region |
|---|---|---|---|---|
| 1 | 1141 | [symbol] | 1142 | [symbol] |
| | | [symbol] | | [symbol] |
| | | | | [symbol] |
| 2 | 1143 | [symbol] | 1144 | [symbol] |
| | | [symbol] | | [symbol] |
| | | | | [symbol] |
| 3 | 1145 | [symbol] | 1146 | [symbol] |
| | | [symbol] | | [symbol] |
| | | | | [symbol] |
| 4 | 1147 | [symbol] | 1148 | [symbol] |
| | | [symbol] | | [symbol] |
| | | | | [symbol] |
| 5 | 1149 | [symbol] | 1150 | [symbol] |
| | | [symbol] | | [symbol] |
| | | | | [symbol] |
| 6 | 1151 | [symbol] | 1152 | [symbol] |
| | | [symbol] | | [symbol] |
| | | | | [symbol] |
| 7 | 1153 | [symbol] | 1154 | [symbol] |
| | | [symbol] | | [symbol] |
| | | | | [symbol] |
| 8 | 1155 | [symbol] | 1156 | [symbol] |
| | | [symbol] | | [symbol] |
| | | | | [symbol] |
| 9 | 1157 | [symbol] | 1158 | [symbol] |
| | | [symbol] | | [symbol] |
| | | | | [symbol] |
| 10 | 1159 | [symbol] | 1160 | [symbol] |
| | | [symbol] | | [symbol] |
| | | | | [symbol] |
| 11 | 1161 | [symbol] | 1162 | [symbol] |
| | | [symbol] | | [symbol] |
| | | | | [symbol] |
| 12 | 1163 | [symbol] | 1164 | [symbol] |
| | | [symbol] | | [symbol] |
| | | | | [symbol] |
| 13 | 1165 | [symbol] | 1166 | [symbol] |
| | | [symbol] | | [symbol] |
| | | | | [symbol] |
| 14 | 1167 | [symbol] | 1168 | [symbol] |
| | | [symbol] | | [symbol] |
| | | | | [symbol] |
| 15 | 1169 | [symbol] | 1170 | [symbol] |
| | | [symbol] | | [symbol] |
| | | | | [symbol] |
| 16 | 1171 | [symbol] | 1172 | [symbol] |
| | | [symbol] | | [symbol] |
| | | | | [symbol] |
| 17 | 1173 | [symbol] | 1174 | [symbol] |
| | | [symbol] | | [symbol] |
| | | | | [symbol] |
| 18 | 1175 | [symbol] | 1176 | [symbol] |
| | | [symbol] | | [symbol] |
| | | | | [symbol] |
| 19 | 1177 | [symbol] | 11788 | [symbol] |
| | | [symbol] | | [symbol] |
| | | | | [symbol] |
| 20 | 1179 | [symbol] | 1180 | [symbol] |
| | | [symbol] | | [symbol] |
| | | | | [symbol] |
| 21 | 1181 | [symbol] | 1182 | [symbol] |
| | | [symbol] | | [symbol] |
| | | | | [symbol] |
| 22 | 1183 | [symbol] | 1184 | [symbol] |
| | | [symbol] | | [symbol] |
| | | | | [symbol] |
| 23 | 1185 | [symbol] | 1186 | [symbol] |
| | | [symbol] | | [symbol] |
| | | | | [symbol] |
| 24 | 1187 | [symbol] | 1188 | [symbol] |
| | | [symbol] | | [symbol] |
| | | | | [symbol] |
| 25 | 1189 | [symbol] | 1190 | [symbol] |
| | | [symbol] | | [symbol] |
| | | | | [symbol] |
| 26 | 1191 | [symbol] | 1192 | [symbol] |
| | | [symbol] | | [symbol] |
| | | | | [symbol] |
| 27 | 1193 | [symbol] | 1194 | [symbol] |
| | | [symbol] | | [symbol] |
| | | | | [symbol] |
| 28 | 1195 | [symbol] | 1196 | [symbol] |
| | | [symbol] | | [symbol] |
| | | | | [symbol] |
| 29 | 1197 | [symbol] | 1198 | [symbol] |
| | | [symbol] | | [symbol] |
| | | | | [symbol] |
| 30 | 1199 | [symbol] | 1200 | [symbol] |
| | | [symbol] | | [symbol] |
| | | | | [symbol] |
| 31 | 1201 | [symbol] | 1202 | [symbol] |
| | | [symbol] | | [symbol] |
| | | | | [symbol] |
| 32 | 1203 | [symbol] | 1204 | [symbol] |
| | | [symbol] | | [symbol] |
| | | | | [symbol] |
| 33 | 1205 | [symbol] | 1206 | [symbol] |
| | | [symbol] | | [symbol] |
| | | | | [symbol] |
| 34 | 1207 | [symbol] | 1208 | [symbol] |
| | | [symbol] | | [symbol] |
| | | | | [symbol] |
| 35 | 1209 | [symbol] | 1210 | [symbol] |
| | | [symbol] | | [symbol] |
| | | | | [symbol] |
| 36 | 1211 | [symbol] | 1212 | [symbol] |
| | | [symbol] | | [symbol] |
| | | | | [symbol] |
| 37 | 1213 | [symbol] | 1214 | [symbol] |
| | | [symbol] | | [symbol] |
| | | | | [symbol] |
| 38 | 1215 | [symbol] | 1216 | [symbol] |
| | | [symbol] | | [symbol] |
| | | | | [symbol] |
| 39 | 1217 | [symbol] | 1218 | [symbol] |
| | | [symbol] | | [symbol] |
| | | | | [symbol] |
| 40 | 1219 | [symbol] | 1220 | [symbol] |
| | | [symbol] | | [symbol] |
| | | | | [symbol] |
| 41 | 1221 | [symbol] | 1222 | [symbol] |
| | | [symbol] | | [symbol] |
| | | | | [symbol] |
| 42 | 1223 | [symbol] | 1224 | [symbol] |
| | | [symbol] | | [symbol] |
| | | | | [symbol] |
| 43 | 1225 | [symbol] | 1226 | [symbol] |
| | | [symbol] | | [symbol] |
| | | | | [symbol] |
| 44 | 1227 | [symbol] | 1228 | [symbol] |
| | | [symbol] | | [symbol] |
| | | | | [symbol] |
| 45 | 1229 | [symbol] | 1230 | [symbol] |
| | | [symbol] | | [symbol] |
| | | | | [symbol] |
| 46 | 1231 | [symbol] | 1232 | [symbol] |
| | | [symbol] | | [symbol] |
| | | | | [symbol] |
| 47 | 1233 | [symbol] | 1234 | [symbol] |
| | | [symbol] | | [symbol] |
| | | | | [symbol] |
| 48 | 1235 | [symbol] | 1236 | [symbol] |
| | | [symbol] | | [symbol] |
| | | | | [symbol] |
| 49 | 1237 | [symbol] | 1238 | [symbol] |
| | | [symbol] | | [symbol] |
| | | | | [symbol] |
| 50 | 1239 | [symbol] | 1240 | [symbol] |
| | | [symbol] | | [symbol] |
| | | | | [symbol] |
| 51 | 1241 | [symbol] | 1242 | [symbol] |
| | | [symbol] | | [symbol] |
| | | | | [symbol] |
| 52 | 1243 | [symbol] | 1244 | [symbol] |
| | | [symbol] | | [symbol] |
| | | | | [symbol] |
| 53 | 1245 | [symbol] | 1246 | [symbol] |
| | | [symbol] | | [symbol] |
| | | | | [symbol] |
| 54 | 1247 | [symbol] | 1248 | [symbol] |
| | | [symbol] | | [symbol] |
| | | | | [symbol] |
| 55 | 1249 | [symbol] | 1250 | [symbol] |
| | | [symbol] | | [symbol] |
| | | | | [symbol] |
| 56 | 1251 | [symbol] | 1252 | [symbol] |
| | | [symbol] | | [symbol] |
| | | | | [symbol] |
| 57 | 1253 | [symbol] | 1254 | [symbol] |
| | | [symbol] | | [symbol] |
| | | | | [symbol] |
| 58 | 1255 | [symbol] | 1256 | [symbol] |
| | | [symbol] | | [symbol] |
| | | | | [symbol] |
| 59 | 1257 | [symbol] | 1258 | [symbol] |
| | | [symbol] | | [symbol] |
| | | | | [symbol] |
| 60 | 1259 | [symbol] | 1260 | [symbol] |
| | | [symbol] | | [symbol] |
| | | | | [symbol] |
| 61 | 1261 | [symbol] | 1262 | [symbol] |
| | | [symbol] | | [symbol] |
| | | | | [symbol] |
| 62 | 1263 | [symbol] | 1264 | [symbol] |
| | | [symbol] | | [symbol] |
| | | | | [symbol] |
| 63 | 1265 | [symbol] | 1266 | [symbol] |
| | | [symbol] | | [symbol] |
| | | | | [symbol] |
| 64 | 1267 | [symbol] | 1268 | [symbol] |
| | | [symbol] | | [symbol] |
| | | | | [symbol] |
| 65 | 1269 | [symbol] | 1270 | [symbol] |
| | | [symbol] | | [symbol] |
| | | | | [symbol] |
| 66 | 1271 | [symbol] | 1272 | [symbol] |
| | | [symbol] | | [symbol] |
| | | | | [symbol] |
| 67 | 1273 | [symbol] | 1274 | [symbol] |
| | | [symbol] | | [symbol] |
| | | | | [symbol] |
| 68 | 1275 | [symbol] | 1276 | [symbol] |
| | | [symbol] | | [symbol] |
| | | | | [symbol] |
| 69 | 1277 | [symbol] | 1278 | [symbol] |
| | | [symbol] | | [symbol] |
| | | | | [symbol] |
| 70 | 1279 | [symbol] | 1280 | [symbol] |
| | | [symbol] | | [symbol] |
| | | | | [symbol] |
| 71 | 1281 | [symbol] | 1282 | [symbol] |
| | | [symbol] | | [symbol] |
| | | | | [symbol] |
| 72 | 1283 | [symbol] | 1284 | [symbol] |
| | | [symbol] | | [symbol] |
| | | | | [symbol] |
| 73 | 1285 | [symbol] | 1286 | [symbol] |
| | | [symbol] | | [symbol] |
| | | | | [symbol] |
| 74 | 1287 | [symbol] | 1288 | [symbol] |
| | | [symbol] | | [symbol] |
| | | | | [symbol] |
| 75 | 1289 | [symbol] | 1290 | [symbol] |
| | | [symbol] | | [symbol] |
| | | | | [symbol] |
| 76 | 1291 | [symbol] | 1292 | [symbol] |
| | | [symbol] | | [symbol] |
| | | | | [symbol] |
| 77 | 1293 | [symbol] | 1294 | [symbol] |
| | | [symbol] | | [symbol] |
| | | | | [symbol] |
| 78 | 1295 | [symbol] | 1296 | [symbol] |
| | | [symbol] | | [symbol] |
| | | | | [symbol] |
| 79 | 1297 | [symbol] | 1298 | [symbol] |
| | | [symbol] | | [symbol] |
| | | | | [symbol] |
| 80 | 1299 | [symbol] | 1300 | [symbol] |
| | | [symbol] | | [symbol] |
| | | | | [symbol] |
| 81 | 1301 | [symbol] | 1302 | [symbol] |
| | | [symbol] | | [symbol] |
| | | | | [symbol] |
| 82 | 1303 | [symbol] | 1304 | [symbol] |
| | | [symbol] | | [symbol] |
| | | | | [symbol] |
| 83 | 1305 | [symbol] | 1306 | [symbol] |
| | | [symbol] | | [symbol] |
| | | | | [symbol] |
| 84 | 1307 | [symbol] | 1308 | [symbol] |
| | | [symbol] | | [symbol] |
| | | | | [symbol] |
| 85 | 1309 | [symbol] | 1310 | [symbol] |
| | | [symbol] | | [symbol] |
| | | | | [symbol] |
| 86 | 1311 | [symbol] | 1312 | [symbol] |
| | | [symbol] | | [symbol] |
| | | | | [symbol] |
| 87 | 1313 | [symbol] | 1314 | [symbol] |
| | | [symbol] | | [symbol] |
| | | | | [symbol] |
| 88 | 1315 | [symbol] | 1316 | [symbol] |
| | | [symbol] | | [symbol] |
| | | | | [symbol] |
| 89 | 1317 | [symbol] | 1318 | [symbol] |
| | | [symbol] | | [symbol] |
| | | | | [symbol] |
| 90 | 1319 | [symbol] | 1320 | [symbol] |
| | | [symbol] | | [symbol] |
| | | | | [symbol] |
| 91 | 1321 | [symbol] | 1322 | [symbol] |
| | | [symbol] | | [symbol] |
| | | | | [symbol] |
| 92 | 1323 | [symbol] | 1324 | [symbol] |
| | | [symbol] | | [symbol] |
| | | | | [symbol] |
| 93 | 1325 | [symbol] | 1326 | [symbol] |
| | | [symbol] | | [symbol] |
| | | | | [symbol] |
| 94 | 1327 | [symbol] | 1328 | [symbol] |
| | | [symbol] | | [symbol] |
| | | | | [symbol] |
| 95 | 1329 | [symbol] | 1330 | [symbol] |
| | | [symbol] | | [symbol] |
| | | | | [symbol] |
| 96 | 1331 | [symbol] | 1332 | [symbol] |
| | | [symbol] | | [symbol] |
| | | | | [symbol] |
| 97 | 1333 | [symbol] | 1334 | [symbol] |
| | | [symbol] | | [symbol] |
| | | | | [symbol] |
| 98 | 1335 | [symbol] | 1336 | [symbol] |
| | | [symbol] | | [symbol] |
| | | | | [symbol] |
| 99 | 1337 | [symbol] | 1338 | [symbol] |
| | | [symbol] | | [symbol] |
| | | | | [symbol] |
| 100 | 1339 | [symbol] | 1340 | [symbol] |
| | | [symbol] | | [symbol] |
| | | | | [symbol] |
| 101 | 1341 | [symbol] | 1342 | [symbol] |
| | | [symbol] | | [symbol] |
| | | | | [symbol] |
| 102 | 1343 | [symbol] | 1344 | [symbol] |
| | | [symbol] | | [symbol] |
| | | | | [symbol] |
| 103 | 1345 | [symbol] | 1346 | [symbol] |
| | | [symbol] | | [symbol] |
| | | | | [symbol] |
| 104 | 1347 | [symbol] | 1348 | [symbol] |
| | | [symbol] | | [symbol] |
| | | | | [symbol] |
| 105 | 1349 | [symbol] | 1350 | [symbol] |
| | | [symbol] | | [symbol] |
| | | | | [symbol] |
| 106 | 1351 | [symbol] | 1352 | [symbol] |
| | | [symbol] | | [symbol] |
| | | | | [symbol] |
| 107 | 1353 | [symbol] | 1354 | [symbol] |
| | | [symbol] | | [symbol] |
| | | | | [symbol] |
| 108 | 1355 | [symbol] | 1356 | [symbol] |
| | | [symbol] | | [symbol] |
| | | | | [symbol] |
| 109 | 1357 | [symbol] | 1358 | [symbol] |
| | | [symbol] | | [symbol] |
| | | | | [symbol] |
| 110 | 1359 | [symbol] | 1360 | [symbol] |
| | | [symbol] | | [symbol] |
| | | | | [symbol] |
| 111 | 1361 | [symbol] | 1362 | [symbol] |
| | | [symbol] | | [symbol] |
| | | | | [symbol] |
| 112 | 1363 | [symbol] | 1364 | [symbol] |
| | | [symbol] | | [symbol] |
| | | | | [symbol] |
| 113 | 1365 | [symbol] | 1366 | [symbol] |
| | | [symbol] | | [symbol] |
| | | | | [symbol] |
| 114 | 1367 | [symbol] | 1368 | [symbol] |
| | | [symbol] | | [symbol] |
| | | | | [symbol] |
| 115 | 1369 | [symbol] | 1370 | [symbol] |
| | | [symbol] | | [symbol] |
| | | | | [symbol] |
| 116 | 1371 | [symbol] | 1372 | [symbol] |
| | | [symbol] | | [symbol] |
| | | | | [symbol] |
| 117 | 1373 | [symbol] | 1374 | [symbol] |
| | | [symbol] | | [symbol] |
| | | | | [symbol] |
| 118 | 1375 | [symbol] | 1376 | [symbol] |
| | | [symbol] | | [symbol] |
| | | | | [symbol] |
| 119 | 1377 | [symbol] | 1378 | [symbol] |
| | | [symbol] | | [symbol] |
| | | | | [symbol] |
| 120 | 1379 | [symbol] | 1380 | [symbol] |
| | | [symbol] | | [symbol] |
| | | | | [symbol] |
| 121 | 1381 | [symbol] | 1382 | [symbol] |
| | | [symbol] | | [symbol] |
| | | | | [symbol] |
| 122 | 1383 | [symbol] | 1384 | [symbol] |
| | | [symbol] | | [symbol] |
| | | | | [symbol] |
| 123 | 1385 | [symbol] | 1386 | [symbol] |
| | | [symbol] | | [symbol] |
| | | | | [symbol] |
| 124 | 1387 | [symbol] | 1388 | [symbol] |
| | | [symbol] | | [symbol] |
| | | | | [symbol] |
| 125 | 1389 | [symbol] | 1390 | [symbol] |
| | | [symbol] | | [symbol] |
| | | | | [symbol] |
| 126 | 1391 | [symbol] | 1392 | [symbol] |
| | | [symbol] | | [symbol] |
| | | | | [symbol] |
| 127 | 1393 | [symbol] | 1394 | [symbol] |
| | | [symbol] | | [symbol] |
| | | | | [symbol] |
| 128 | 1395 | [symbol] | 1396 | [symbol] |
| | | [symbol] | | [symbol] |
| | | | | [symbol] |
| 129 | 1397 | [symbol] | 1398 | [symbol] |
| | | [symbol] | | [symbol] |
| | | | | [symbol] |
| 130 | 1399 | [symbol] | 1400 | [symbol] |
| | | [symbol] | | [symbol] |
| | | | | [symbol] |
| 131 | 1401 | [symbol] | 1402 | [symbol] |
| | | [symbol] | | [symbol] |
| | | | | [symbol] |
| 132 | 1403 | [symbol] | 1404 | [symbol] |
| | | [symbol] | | [symbol] |
| | | | | [symbol] |
| 133 | 1405 | [symbol] | 1406 | [symbol] |
| | | [symbol] | | [symbol] |
| | | | | [symbol] |
| 134 | 1407 | [symbol] | 1408 | [symbol] |
| | | [symbol] | | [symbol] |
| | | | | [symbol] |
| 135 | 1409 | [symbol] | 1410 | [symbol] |
| | | [symbol] | | [symbol] |
| | | | | [symbol] |
| 136 | 1411 | [symbol] | 1412 | [symbol] |
| | | [symbol] | | [symbol] |
| | | | | [symbol] |
| 137 | 1413 | [symbol] | 1414 | [symbol] |
| | | [symbol] | | [symbol] |
| | | | | [symbol] |
| 138 | 1415 | [symbol] | 1416 | [symbol] |
| | | [symbol] | | [symbol] |
| | | | | [symbol] |
| 139 | 1417 | [symbol] | 1418 | [symbol] |
| | | [symbol] | | [symbol] |
| | | | | [symbol] |
| 140 | 1419 | [symbol] | 1420 | [symbol] |
| | | [symbol] | | [symbol] |
| | | | | [symbol] |
| 141 | 1421 | [symbol] | 1422 | [symbol] |
| | | [symbol] | | [symbol] |
| | | | | [symbol] |
| 142 | 1423 | [symbol] | 1424 | [symbol] |
| | | [symbol] | | [symbol] |
| | | | | [symbol] |
| 143 | 1425 | [symbol] | 1426 | [symbol] |
| | | [symbol] | | [symbol] |
| | | | | [symbol] |
| 144 | 1427 | [symbol] | 1428 | [symbol] |
| | | [symbol] | | [symbol] |
| | | | | [symbol] |
| 145 | 1429 | [symbol] | 1430 | [symbol] |
| | | [symbol] | | [symbol] |
| | | | | [symbol] |
| 146 | 1431 | [symbol] | 1432 | [symbol] |
| | | [symbol] | | [symbol] |
| | | | | [symbol] |
| 147 | 1433 | [symbol] | 1434 | [symbol] |
| | | [symbol] | | [symbol] |
| | | | | [symbol] |
| 148 | 1435 | [symbol] | 1436 | [symbol] |
| | | [symbol] | | [symbol] |
| | | | | [symbol] |
| 149 | 1437 | [symbol] | 1438 | [symbol] |
| | | [symbol] | | [symbol] |
| | | | | [symbol] |
| 150 | 1439 | [symbol] | 1440 | [symbol] |
| | | [symbol] | | [symbol] |
| | | | | [symbol] |
| 151 | 1441 | [symbol] | 1442 | [symbol] |
| | | [symbol] | | [symbol] |
| | | | | [symbol] |
| 152 | 1443 | [symbol] | 1444 | [symbol] |
| | | [symbol] | | [symbol] |
| | | | | [symbol] |
| 153 | 1445 | [symbol] | 1446 | [symbol] |
| | | [symbol] | | [symbol] |
| | | | | [symbol] |
| 154 | 1447 | [symbol] | 1448 | [symbol] |
| | | [symbol] | | [symbol] |
| | | | | [symbol] |
| 155 | 1449 | [symbol] | 1450 | [symbol] |
| | | [symbol] | | [symbol] |
| | | | | [symbol] |
| 156 | 1451 | [symbol] | 1452 | [symbol] |
| | | [symbol] | | [symbol] |
| | | | | [symbol] |
| 157 | 1453 | [symbol] | 1454 | [symbol] |
| | | [symbol] | | [symbol] |
| | | | | [symbol] |
| 158 | 1455 | [symbol] | 1456 | [symbol] |
| | | [symbol] | | [symbol] |
| | | | | [symbol] |
| 159 | 1457 | [symbol] | 1458 | [symbol] |
| | | [symbol] | | [symbol] |
| | | | | [symbol] |
| 160 | 1459 | [symbol] | 1460 | [symbol] |
| | | [symbol] | | [symbol] |
| | | | | [symbol] |
| 161 | 1461 | [symbol] | 1462 | [symbol] |
| | | [symbol] | | [symbol] |
| | | | | [symbol] |
| 162 | 1463 | [symbol] | 1464 | [symbol] |
| | | [symbol] | | [symbol] |
| | | | | [symbol] |
| 163 | 1465 | [symbol] | 1466 | [symbol] |
| | | [symbol] | | [symbol] |
| | | | | [symbol] |
| 164 | 1467 | [symbol] | 1468 | [symbol] |
| | | [symbol] | | [symbol] |
| | | | | [symbol] |
| 165 | 1469 | [symbol] | 1470 | [symbol] |
| | | [symbol] | | [symbol] |
| | | | | [symbol] |
| 166 | 1471 | [symbol] | 1472 | [symbol] |
| | | [symbol] | | [symbol] |
| | | | | [symbol] |
| 167 | 1473 | [symbol] | 1474 | [symbol] |
| | | [symbol] | | [symbol] |
| | | | | [symbol] |
| 168 | 1475 | [symbol] | 1476 | [symbol] |
| | | [symbol] | | [symbol] |
| | | | | [symbol] |
| 169 | 1477 | [symbol] | 1478 | [symbol] |
| | | [symbol] | | [symbol] |
| | | | | [symbol] |
| 170 | 1479 | [symbol] | 1480 | [symbol] |
| | | [symbol] | | [symbol] |
| | | | | [symbol] |
| 171 | 1481 | [symbol] | 1482 | [symbol] |
| | | [symbol] | | [symbol] |
| | | | | [symbol] |
| 172 | 1483 | [symbol] | 1484 | [symbol] |
| | | [symbol] | | [symbol] |
| | | | | [symbol] |
| 173 | 1485 | [symbol] | 1486 | [symbol] |
| | | [symbol] | | [symbol] |
| | | | | [symbol] |
| 174 | 1487 | [symbol] | 1488 | [symbol] |
| | | [symbol] | | [symbol] |
| | | | | [symbol] |
| 175 | 1489 | [symbol] | 1490 | [symbol] |
| | | [symbol] | | [symbol] |
| | | | | [symbol] |
| 176 | 1491 | [symbol] | 1492 | [symbol] |
| | | [symbol] | | [symbol] |
| | | | | [symbol] |
| 177 | 1493 | [symbol] | 1494 | [symbol] |
| | | [symbol] | | [symbol] |
| | | | | [symbol] |
| 178 | 1495 | [symbol] | 1496 | [symbol] |
| | | [symbol] | | [symbol] |
| | | | | [symbol] |
| 179 | 1497 | [symbol] | 1498 | [symbol] |
| | | [symbol] | | [symbol] |
| | | | | [symbol] |
| 180 | 1409 | [symbol] | 1500 | [symbol] |
| | | [symbol] | | [symbol] |
| | | | | [symbol] |
| 181 | 1501 | [symbol] | 1502 | [symbol] |
| | | [symbol] | | [symbol] |
| | | | | [symbol] |
| 182 | 1503 | [symbol] | 1504 | [symbol] |
| | | [symbol] | | [symbol] |
| | | | | [symbol] |
| 183 | 1505 | [symbol] | 1506 | [symbol] |
| | | [symbol] | | [symbol] |
| | | | | [symbol] |
| 184 | 1507 | [symbol] | 1508 | [symbol] |
| | | [symbol] | | [symbol] |
| | | | | [symbol] |
| 185 | 1509 | [symbol] | 1510 | [symbol] |
| | | [symbol] | | [symbol] |
| | | | | [symbol] |
| 186 | 1511 | [symbol] | 1512 | [symbol] |
| | | [symbol] | | [symbol] |
| | | | | [symbol] |
| 187 | 1513 | [symbol] | 1514 | [symbol] |
| | | [symbol] | | [symbol] |
| | | | | [symbol] |
| 188 | 1515 | [symbol] | 1516 | [symbol] |
| | | [symbol] | | [symbol] |
| | | | | [symbol] |
| 189 | 1517 | [symbol] | 1518 | [symbol] |
| | | [symbol] | | [symbol] |
| | | | | [symbol] |
| 190 | 1519 | [symbol] | 1520 | [symbol] |
| | | [symbol] | | [symbol] |
| | | | | [symbol] |

[symbol]

indicates data missing or illegible when filed

[0165] In another embodiment of the present invention, the binding molecule comprises a binding molecule having a sequence identity of 80% to 99%, preferably 85 to 99%, more preferably 90 to 99% to any one binding molecule selected from the group consisting of binding molecule Nos. 1 to 190 shown in Table 2 above, and this binding molecule is included within the scope of the present invention as long as it achieves the purposes and effects of the present invention.

[0166] In another embodiment of the present invention, the binding molecule comprises a binding molecule having a sequence identity of 80% to 99%, preferably 85 to 99%, more preferably 90 to 99% to any one binding molecule selected from the group consisting of binding molecule Nos. 2, 3, 12, 15, 16, 18, 19, 20, 22, 23, 24, 26, 31, 32, 33, 34, 37, 43, 45, 48, 50, 51, 53, 54, 55, 56, 59, 60, 61, 66, 69, 74, 75, 76, 81, 82, 83, 85, 86, 87, 93, 94, 95, 96, 98, 102, 103, 104 and 108 shown in Table 2 above, and this binding molecule is included within the scope of the present invention as long as it achieves the purposes and effects of the present invention.

[0167] In another embodiment of the present invention, the binding molecule comprises a binding molecule having a sequence identity of 80% to 99%, preferably 85 to 99%, more preferably 90 to 99% to any one binding molecule selected from the group consisting of binding molecule Nos. 2, 32, 59, 95, 102 and 103 shown in Table 2 above, and this binding molecule is included within the scope of the present invention as long as it achieves the purposes and effects of the present invention.

[0168] In another embodiment of the present invention, the binding molecule comprises a binding molecule having a sequence identity of 80% to 99%, preferably 85 to 99%, more preferably 90 to 99% to any one binding molecule selected from the group consisting of binding molecule Nos. 32, 33, 34, 37, 45, 48, 53, 54, 59, 61 and 81 shown in Table 2 above, and this binding molecule is included within the scope of the present invention as long as it achieves the purposes and effects of the present invention.

[0169] In another embodiment of the present invention, the binding molecule comprises a binding molecule having a sequence identity of 80% to 99%, preferably 85 to 99%, more preferably 90 to 99% to any one binding molecule selected from the group consisting of binding molecule Nos. 32, 34, 37, 45 and 54 shown in Table 2 above, and this binding molecule is included within the scope of the present invention as long as it achieves the purposes and effects of the present invention.

[0170] In another embodiment of the present invention, the binding molecule comprises a binding molecule having a sequence identity of 80% to 99%, preferably 85 to 99%, more preferably 90 to 99% to any one binding molecule selected from the group consisting of binding molecule Nos. 32 and 54 shown in Table 2 above, and this binding molecule is included within the scope of the present invention as long as it achieves the purposes and effects of the present invention.

[0171] In another embodiment of the present invention, the binding molecule comprises a binding molecule having a sequence identity of 80% to 99%, preferably 85 to 99%, more preferably 90 to 99% to the binding molecule of binding molecule No. 32 shown in Table 2 above, and this binding molecule is included within the scope of the present invention as long as it achieves the purposes and effects of the present invention.

[0172] In one embodiment of the present invention, the binding molecule may be a binding molecule comprising three light-chain CDR regions (LC CDR1, LC CDR2, and LC CDR3) contained in a light-chain (LC) variable region set forth in any one selected from the group consisting of SEQ ID NOS: 1141, 1143, 1145, 1147, 1149, 1151, 1153, 1155, 1157, 1159, 1161, 1163, 1165, 1167, 1169, 1171, 1173, 1175, 1177, 1179, 1181, 1183, 1185, 1187, 1189, 1191, 1193, 1195, 1197, 1199, 1201, 1203, 1205, 1207, 1209, 1211, 1213, 1215, 1217, 1219, 1221, 1223, 1225, 1227, 1229, 1231, 1233, 1235, 1237, 1239, 1241, 1243, 1245, 1247, 1249, 1251, 1253, 1255, 1257, 1259, 1261, 1263, 1265, 1267, 1269, 1271, 1273, 1275, 1277, 1279, 1281, 1283, 1285, 1287, 1289, 1291, 1293, 1295, 1297, 1299, 1301, 1303, 1305, 1307, 1309, 1311, 1313, 1315, 1317, 1319, 1321, 1323, 1325, 1327, 1329, 1331, 1333, 1335, 1337, 1339, 1341, 1343, 1345, 1347, 1349, 1351, 1353, 1355, 1357, 1359, 1361, 1363, 1365, 1367, 1369, 1371, 1373, 1375, 1377, 1379, 1381, 1383, 1385, 1387, 1389, 1391, 1393, 1395, 1397, 1399, 1401, 1403, 1405, 1407, 1409, 1411, 1413, 1415, 1417, 1419, 1421, 1423, 1425, 1427, 1429, 1431, 1433, 1435, 1437, 1439, 1441, 1443, 1445, 1447, 1449, 1451, 1453, 1455, 1457, 1459, 1461, 1463, 1465, 1467, 1469, 1471, 1473, 1475, 1477, 1479, 1481, 1483, 1485, 1487, 1489, 1491, 1493, 1495, 1497, 1499, 1501, 1503, 1505, 1507, 1509, 1511, 1513, 1515, 1517, and 1519, and three heavy-chain CDR regions (HC CDR1, HC CDR2, and HC CDR3) contained in a heavy-chain (HC) variable region set forth in any one selected from the group consisting of SEQ ID NOS: 1142, 1144, 1146, 1148, 1150, 1152, 1154, 1156, 1158, 1160, 1162, 1164, 1166, 1168, 1170, 1172, 1174, 1176, 1178, 1180, 1182, 1184, 1186, 1188, 1190, 1192, 1194, 1196, 1198, 1200, 1202, 1204, 1206, 1208, 1210, 1212, 1214, 1216, 1218, 1220, 1222, 1224, 1226, 1228, 1230, 1232, 1234, 1236, 1238, 1240, 1242, 1244, 1246, 1248, 1250, 1252, 1254, 1256, 1258, 1260, 1262, 1264, 1266, 1268, 1270, 1272, 1274, 1276, 1278, 1280, 1282, 1284, 1286, 1288, 1290, 1292, 1294, 1296, 1298, 1300, 1302, 1304, 1306, 1308, 1310, 1312, 1314, 1316, 1318, 1320, 1322, 1324, 1326, 1328, 1330, 1332, 1334, 1336, 1338, 1340, 1342, 1344, 1346, 1348, 1350, 1352, 1354, 1356, 1358, 1360, 1362, 1364, 1366, 1368, 1370, 1372, 1374, 1376, 1378, 1380, 1382, 1384, 1386, 1388, 1390, 1392, 1394, 1396, 1398, 1400, 1402, 1404, 1406, 1408, 1410, 1412, 1414, 1416, 1418, 1420, 1422, 1424, 1426, 1428, 1430, 1432, 1434, 1436, 1438, 1440, 1442, 1444, 1446, 1448, 1450, 1452, 1454, 1456, 1458, 1460, 1462, 1464, 1466, 1468, 1470, 1472, 1474, 1476, 1478, 1480, 1482, 1484, 1486, 1488, 1490, 1492, 1494, 1496, 1498, 1500, 1502, 1504, 1506, 1508, 1510, 1512, 1514, 1516, 1518 and 1520.

[0173] In another embodiment of the present invention, the binding molecule may be a binding molecule comprising three light-chain CDR regions (LC CDR1, LC CDR2, and LC CDR3) contained in a light-chain (LC) variable region set forth in any one selected from the group consisting of SEQ ID NOS: 1143, 1145, 1163, 1169, 1171, 1175, 1177, 1179, 1183, 1185, 1187, 1191, 1201, 1203, 1205, 1207, 1213, 1225, 1229, 1235, 1239, 1241, 1245, 1247, 1249, 1251, 1257, 1259, 1261, 1271, 1277, 1287, 1289, 1291, 1301, 1303, 1305, 1309, 1311, 1313, 1325, 1327, 1329, 1331, 1335, 1343, 1345, 1347 and 1355, and three heavy-chain CDR regions (HC CDR1, HC CDR2, and HC CDR3) contained in a heavy-chain (HC) variable region set forth in any one selected from the group consisting of SEQ ID NOS: 1144, 1146, 1164, 1170, 1172, 1176, 1178, 1180, 1184, 1186, 1188, 1192, 1202, 1204, 1206, 1208, 1214, 1226, 1230, 1236, 1240, 1242, 1246, 1248, 1250, 1252, 1258, 1260, 1262, 1272, 1278, 1288, 1290, 1292, 1302, 1304, 1306, 1310, 1312, 1314, 1326, 1328, 1330, 1332, 1336, 1344, 1346, 1348 and 1356.

[0174] In another embodiment of the present invention, the binding molecule may be a binding molecule comprising three light-chain CDR regions (LC CDR1, LC CDR2, and LC CDR3) contained in a light-chain (LC) variable region set forth in any one selected from the group consisting of SEQ ID NOS: 1143, 1203, 1257, 1329, 1343 and 1345, and three heavy-chain CDR regions (HC CDR1, HC CDR2, and HC CDR3) contained in a heavy-chain (HC) variable region set forth in any one selected from the group consisting of SEQ ID NOS: 1144, 1204, 1258, 1330, 1344 and 1346.

[0175] In another embodiment of the present invention, the binding molecule may be a binding molecule comprising three light-chain CDR regions (LC CDR1, LC CDR2, and LC CDR3) contained in a light-chain (LC) variable region set forth in any one selected from the group consisting of SEQ ID NOS: 1203, 1205, 1207, 1213, 1229, 1235, 1245, 1247, 1257, 1261 and 1301, and three heavy-chain CDR regions (HC CDR1, HC CDR2, and HC CDR3) contained in a heavy-chain (HC) variable region set forth in any one selected from the group consisting of SEQ ID NOS: 1204, 1206, 1208, 1214, 1230, 1236, 1246, 1248, 1258, 1262 and 1302.

[0176] In another embodiment of the present invention, the binding molecule may be a binding molecule comprising three light-chain CDR regions (LC CDR1, LC CDR2, and LC CDR3) contained in a light-chain (LC) variable region set forth in any one selected from the group consisting of SEQ ID NOS: 1203, 1207, 1213, 1229 and 1247, and three heavy-chain CDR regions (HC CDR1, HC CDR2, and HC CDR3) contained in a heavy-chain (HC) variable region set forth in any one selected from the group consisting of SEQ ID NOS: 1204, 1208, 1214, 1230 and 1248.

[0177] In another embodiment of the present invention, the binding molecule may be a binding molecule comprising three light-chain CDR regions (LC CDR1, LC CDR2, and LC CDR3) contained in a light-chain (LC) variable region set forth in any one selected from the group consisting of SEQ ID NOS: 1203 and 1247, and three heavy-chain CDR regions (HC CDR1, HC CDR2, and HC CDR3) contained in a heavy-chain (HC) variable region set forth in any one selected from the group consisting of SEQ ID NOS: 1204 and 1248.

[0178] In another embodiment of the present invention, the binding molecule may be a binding molecule comprising three light-chain CDR regions (LC CDR1, LC CDR2, and LC CDR3) contained in a light-chain (LC) variable region set forth in SEQ ID NO: 1203, and three heavy-chain CDR regions (HC CDR1, HC CDR2, and HC CDR3) contained in a heavy-chain (HC) variable region set forth in SEQ ID NO: 1204.

[0179] In one embodiment, the LC CDR1 may comprises any one selected from the group consisting of SEQ ID NOS: 1, 7, 13, 19, 25, 31, 37, 43, 49, 55, 61, 67, 73, 79, 85, 91, 97, 103, 109, 115, 121, 127, 133, 139, 145, 151, 157, 163, 169, 175, 181, 187, 193, 199, 205, 211, 217, 223, 229, 235, 241, 247, 253, 259, 265, 271, 277, 283, 289, 295, 301, 307, 313, 319, 325, 331, 337, 343, 349, 355, 361, 367, 373, 379, 385, 391, 397, 403, 409, 415, 421, 427, 433, 439, 445, 451, 457, 463, 469, 475, 481, 487, 493, 499, 505, 511, 517, 523, 529, 535, 541, 547, 553, 559, 565, 571, 577, 583, 589, 595, 601, 607, 613, 619, 625, 631, 637, 643, 649, 655, 661, 667, 673, 679, 685, 691, 697, 703, 709, 715, 721, 727, 733, 739, 745, 751, 757, 763, 769, 775, 781, 787, 793, 799, 805, 811, 817, 823, 829, 835, 841, 847, 853, 859, 865, 871, 877, 883, 889, 895, 901, 907, 913, 919, 925, 931, 937, 943, 949, 955, 961, 967, 973, 979, 985, 991, 997, 1003, 1009, 1015, 1021, 1027, 1033, 1039, 1045, 1051, 1057, 1063, 1069, 1075, 1081, 1087, 1093, 1099, 1105, 1111, 1117, 1123, 1129 and 1135, or a sequence derived therefrom, or
[0180] comprise any one selected from the group consisting of SEQ ID NOS: 7, 13, 67, 85, 91, 103, 109, 115, 127, 133, 139, 151, 181, 187, 193, 199, 217, 253, 265, 283, 295, 301, 313, 319, 325, 331, 349, 355, 361, 391, 409, 439, 445, 451, 481, 487, 493, 505, 511, 517, 553, 559, 565, 571, 583, 607, 613, 619 and 643, or a sequence derived therefrom, or
[0181] comprise any one selected from the group consisting of SEQ ID NOS: 7, 187, 349, 565, 607 and 613, or a sequence derived therefrom, or
[0182] comprise any one selected from the group consisting of SEQ ID NOS: 187, 193, 199, 217, 265, 283, 313, 319, 349, 361 and 481, or a sequence derived therefrom, or
[0183] comprise any one selected from the group consisting of SEQ ID NOS: 187, 199, 217, 265 and 319, or a sequence derived therefrom, or
[0184] comprise any one selected from the group consisting of SEQ ID NOS: 187 and 319, or a sequence derived therefrom.

[0185] The LC CDR2 may comprise any one selected from the group consisting of SEQ ID NOS: 2, 8, 14, 20, 26, 32, 38, 44, 50, 56, 62, 68, 74, 80, 86, 92, 98, 104, 110, 116, 122, 128, 134, 140, 146, 152, 158, 164, 170, 176, 182, 188, 194, 200, 206, 212, 218, 224, 230, 236, 242, 248, 254, 260, 266, 272, 278, 284, 290, 296, 302, 308, 314, 320, 326, 332, 338, 344, 350, 356, 362, 368, 374, 380, 386, 392, 398, 404, 410, 416, 422, 428, 434, 440, 446, 452, 458, 464, 470, 476, 482, 488, 494, 500, 506, 512, 518, 524, 530, 536, 542, 548, 554, 560, 566, 572, 578, 584, 590, 596, 602, 608, 614, 620, 626, 632, 638, 644, 650, 656, 662, 668, 674, 680, 686, 692, 698, 704, 710, 716, 722, 728, 734, 740, 746, 752, 758, 764, 770, 776, 782, 788, 794, 800, 806, 812, 818, 824, 830, 836, 842, 848, 854, 860, 866, 872, 878, 884, 890, 896, 902, 908, 914, 920, 926, 932, 938, 944, 950, 956, 962, 968, 974, 980, 986, 992, 998, 1004, 1010, 1016, 1022, 1028, 1034, 1040, 1046, 1052, 1058, 1064, 1070, 1076, 1082, 1088, 1094, 1100, 1106, 1112, 1118, 1124, 1130 and 1136, or a sequence derived therefrom, or
[0186] comprise any one selected from the group consisting of SEQ ID NOS: 8, 14, 68, 86, 92, 104, 110, 116, 128, 134, 140, 152, 182, 188, 194, 200, 218, 254, 266, 284, 296, 302, 314, 320, 326, 332, 350, 356, 362, 392, 410, 440, 446, 452, 482, 488, 494, 506, 512, 518, 554, 560, 566, 572, 584, 608, 614, 620 and 644, or a sequence derived therefrom, or
[0187] comprise any one selected from the group consisting of SEQ ID NOS: 8, 188, 350, 566, 608 and 614, or a sequence derived therefrom, or
[0188] comprise any one selected from the group consisting of SEQ ID NOS: 188, 194, 200, 218, 266, 284, 314, 320, 350, 362 and 482, or a sequence derived therefrom, or
[0189] comprise any one selected from the group consisting of SEQ ID NOS: 188, 200, 218, 266 and 320, or a sequence derived therefrom, or
[0190] comprise any one selected from the group consisting of SEQ ID NOS: 188 and 320, or a sequence derived therefrom.

[0191] The LC CDR3 may comprise any one selected from the group consisting of SEQ ID NOS: 3, 9, 15, 21, 27, 33, 39, 45, 51, 57, 63, 69, 75, 81, 87, 93, 99, 105, 111, 117, 123, 129, 135, 141, 147, 153, 159, 165, 171, 177, 183, 189, 195, 201, 207, 213, 219, 225, 231, 237, 243, 249, 255, 261, 267, 273, 279, 285, 291, 297, 303, 309, 315, 321, 327, 333, 339, 345, 351, 357, 363, 369, 375, 381, 387, 393, 399, 405, 411, 417, 423, 429, 435, 441, 447, 453, 459, 465, 471, 477, 483, 489, 495, 501, 507, 513, 519, 525, 531, 537, 543, 549, 555, 561, 567, 573, 579, 585, 591, 597, 603, 609, 615, 621, 627, 633, 639, 645, 651, 657, 663, 669, 675, 681, 687, 693, 699, 705, 711, 717, 723, 729, 735, 741, 747, 753, 759, 765, 771, 777, 783, 789, 795, 801, 807, 813, 819, 825, 831, 837, 843, 849, 855, 861, 867, 873, 879, 885, 891, 897, 903, 909, 915, 921, 927, 933, 939, 945, 951, 957, 963, 969, 975, 981, 987, 993, 999, 1005, 1011, 1017, 1023, 1029, 1035, 1041, 1047, 1053, 1059, 1065, 1071, 1077, 1083, 1089, 1095, 1101, 1107, 1113, 1119, 1125, 1131 and 1137, or a sequence derived therefrom, or
[0192] comprise any one selected from the group consisting of SEQ ID NOS: 9, 15, 69, 87, 93, 105, 111, 117, 129, 135, 141, 153, 183, 189, 195, 201, 219, 255, 267, 285, 297, 303, 315, 321, 327, 333, 351, 357, 363, 393, 411, 441, 447, 453, 483, 489, 495, 507, 513, 519, 555, 561, 567, 573, 585, 609, 615, 621 and 645, or a sequence derived therefrom, or
[0193] comprise any one selected from the group consisting of SEQ ID NOS: 9, 189, 351, 567, 609 and 615, or a sequence derived therefrom, or
[0194] comprise any one selected from the group consisting of SEQ ID NOS: 189, 195, 201, 219, 267, 285, 315, 321, 351, 363 and 483, or a sequence derived therefrom, or
[0195] comprise any one selected from the group consisting of SEQ ID NOS: 189, 201, 219, 267 and 321, or a sequence derived therefrom, or
[0196] comprise any one selected from the group consisting of SEQ ID NOS: 189 and 321, or a sequence derived therefrom.

[0197] The HC CDR1 may comprise any one selected from the group consisting of SEQ ID NOS: 4, 10, 16, 22, 28, 34, 40, 46, 52, 58, 64, 70, 76, 82, 88, 94, 100, 106, 112, 118, 124, 130, 136, 142, 148, 154, 160, 166, 172, 178, 184, 190, 196, 202, 208, 214, 220, 226, 232, 238, 244, 250, 256, 262, 268, 274, 280, 286, 292, 298, 304, 310, 316, 322, 328, 334, 340, 346, 352, 358, 364, 370, 376, 382, 388, 394, 400, 406, 412, 418, 424, 430, 436, 442, 448, 454, 460, 466, 472, 478, 484, 490, 496, 502, 508, 514, 520, 526, 532, 538, 544, 550, 556, 562, 568, 574, 580, 586, 592, 598, 604, 610, 616, 622, 628, 634, 640, 646, 652, 658, 664, 670, 676, 682, 688, 694, 700, 706, 712, 718, 724, 730, 736, 742, 748, 754, 760, 766, 772, 778, 784, 790, 796, 802, 808, 814, 820, 826, 832, 838, 844, 850, 856, 862, 868, 874, 880, 886, 892, 898, 904, 910, 916, 922, 928, 934, 940, 946, 952, 958, 964, 970, 976, 982, 988, 994, 1000, 1006, 1012, 1018, 1024, 1030, 1036, 1042, 1048, 1054, 1060, 1066, 1072, 1078, 1084, 1090, 1096, 1102, 1108, 1114, 1120, 1126, 1132 and 1138, or a sequence derived therefrom, or
[0198] comprise any one selected from the group consisting of SEQ ID NOS: 10, 16, 70, 88, 94, 106, 112, 118, 130, 136, 142, 154, 184, 190, 196, 202, 220, 256, 268, 286, 298, 304, 316, 322, 328, 334, 352, 358, 364, 394, 412, 442, 448, 454, 484, 490, 496, 508, 514, 520, 556, 562, 568, 574, 586, 610, 616, 622 and 646, or a sequence derived therefrom, or
[0199] comprise any one selected from the group consisting of SEQ ID NOS: 10, 190, 352, 568, 610 and 616, or a sequence derived therefrom, or
[0200] comprise any one selected from the group consisting of SEQ ID NOS: 190, 196, 202, 220, 268, 286, 316, 322, 352, 364 and 484, or a sequence derived therefrom, or
[0201] comprise any one selected from the group consisting of SEQ ID NOS: 190, 202, 220, 268 and 322, or a sequence derived therefrom, or
[0202] comprise any one selected from the group consisting of SEQ ID NOS: 190 and 322, or a sequence derived therefrom.

[0203] The HC CDR2 may any one selected from the group consisting of SEQ ID NOS: 5, 11, 17, 23, 29, 35, 41, 47, 53, 59, 65, 71, 77, 83, 89, 95, 101, 107, 113, 119, 125, 131, 137, 143, 149, 155, 161, 167, 173, 179, 185, 191, 197, 203, 209, 215, 221, 227, 233, 239, 245, 251, 257, 263, 269, 275, 281, 287, 293, 299, 305, 311, 317, 323, 329, 335, 341, 347, 353, 359, 365, 371, 377, 383, 389, 395, 401, 407, 413, 419, 425, 431, 437, 443, 449, 455, 461, 467, 473, 479, 485, 491, 497, 503, 509, 515, 521, 527, 533, 539, 545, 551, 557, 563, 569, 575, 581, 587, 593, 599, 605, 611, 617, 623, 629, 635, 641, 647, 653, 659, 665, 671, 677, 683, 689, 695, 701, 707, 713, 719, 725, 731, 737, 743, 749, 755, 761, 767, 773, 779, 785, 791, 797, 803, 809, 815, 821, 827, 833, 839, 845, 851, 857, 863, 869, 875, 881, 887, 893, 899, 905, 911, 917, 923, 929, 935, 941, 947, 953, 959, 965, 971, 977, 983, 989, 995, 1001, 1007, 1013, 1019, 1025, 1031, 1037, 1043, 1049, 1055, 1061, 1067, 1073, 1079, 1085, 1091, 1097, 1103, 1109, 1115, 1121, 1127, 1133 and 1139, or a sequence derived therefrom, or
[0204] comprise any one selected from the group consisting of SEQ ID NOS: 11, 17, 71, 89, 95, 107, 113, 119, 131, 137, 143, 155, 185, 191, 197, 203, 221, 257, 269, 287, 299, 305, 317, 323, 329, 335, 353, 359, 365, 395, 413, 443, 449, 455, 485, 491, 497, 509, 515, 521, 557, 563, 569, 575, 587, 611, 617, 623 and 647, or a sequence derived therefrom, or
[0205] comprise any one selected from the group consisting of SEQ ID NOS: 11, 191, 353, 569, 611 and 617, or a sequence derived therefrom, or
[0206] comprise any one selected from the group consisting of SEQ ID NOS: 191, 197, 203, 221, 269, 287, 317, 323, 353, 365 and 485, or a sequence derived therefrom, or
[0207] comprise any one selected from the group consisting of SEQ ID NOS: 191, 203, 221, 269 and 323, or a sequence derived therefrom, or
[0208] comprise any one selected from the group consisting of SEQ ID NOS: 191 and 323, or a sequence derived therefrom.

[0209] The HC CDR3 may comprise any one selected from the group consisting of SEQ ID NOS: 6, 12, 18, 24, 30, 36, 42, 48, 54, 60, 66, 72, 78, 84, 90, 96, 102, 108, 114, 120, 126, 132, 138, 144, 150, 156, 162, 168, 174, 180, 186, 192, 198, 204, 210, 216, 222, 228, 234, 240, 246, 252, 258, 264, 270, 276, 282, 288, 294, 300, 306, 312, 318, 324, 330, 336, 342, 348, 354, 360, 366, 372, 378, 384, 390, 396, 402, 408, 414, 420, 426, 432, 438, 444, 450, 456, 462, 468, 474, 480, 486, 492, 498, 504, 510, 516, 522, 528, 534, 540, 546, 552, 558, 564, 570, 576, 582, 588, 594, 600, 606, 612, 618, 624, 630, 636, 642, 648, 654, 660, 666, 672, 678, 684, 690, 696, 702, 708, 714, 720, 726, 732, 738, 744, 750, 756, 762, 768, 774, 780, 786, 792, 798, 804, 810, 816, 822, 828, 834, 840, 846, 852, 858, 864, 870, 876, 882, 888, 894, 900, 906, 912, 918, 924, 930, 936, 942, 948, 954, 960, 966, 972, 978, 984, 990, 996, 1002, 1008, 1014, 1020, 1026, 1032, 1038, 1044, 1050, 1056, 1062, 1068, 1074, 1080, 1086, 1092, 1098, 1104, 1110, 1116, 1122, 1128, 1134 and 1140, or a sequence derived therefrom, or
[0210] comprise any one selected from the group consisting of SEQ ID NOS: 12, 18, 72, 90, 96, 108, 114, 120, 132, 138, 144, 156, 186, 192, 198, 204, 222, 258, 270, 288, 300, 306, 318, 324, 330, 336, 354, 360, 366, 396, 414, 444, 450, 456, 486, 492, 498, 510, 516, 522, 558, 564, 570, 576, 588, 612, 618, 624 and 648, or a sequence derived therefrom, or
[0211] comprise any one selected from the group consisting of SEQ ID NOS: 12, 192, 354, 570, 612 and 618, or a sequence derived therefrom, or
[0212] comprise any one selected from the group consisting of SEQ ID NOS: 192, 198, 204, 222, 270, 288, 318, 324, 354, 366 and 486, or a sequence derived therefrom, or
[0213] comprise any one selected from the group consisting of SEQ ID NOS: 192, 204, 222, 270 and 324, or a sequence derived therefrom, or
[0214] comprise any one selected from the group consisting of SEQ ID NOS: 192 and 324, or a sequence derived therefrom.

[0215] In one embodiment of the present invention, the binding molecule is a binding molecule that binds to a spike protein (S protein) on the surface of SARS-coronavirus-2 (SARS-CoV-2), and comprises a binding molecule that competes with any one binding molecule selected from the group consisting of the following binding molecules 1) to 190), and this binding molecule is included within the scope of the present invention as long as it achieves the purposes and effects of the present invention:
[0216] 1) a binding molecule comprising a) a light-chain variable region comprising a CDR1 region of SEQ ID NO: 1, a CDR2 region of SEQ ID NO: 2, and a CDR3 region of SEQ ID NO: 3, and b) a heavy-chain variable region comprising a CDR1 region of SEQ ID NO: 4, a CDR2 region of SEQ ID NO: 5, and a CDR3 region of SEQ ID NO: 6;
[0217] 2) a binding molecule comprising a) a light-chain variable region comprising a CDR1 region of SEQ ID NO: 7, a CDR2 region of SEQ ID NO: 8, and a CDR3 region of SEQ ID NO: 9, and b) a heavy-chain variable region comprising a CDR1 region of SEQ ID NO: 10, a CDR2 region of SEQ ID NO: 11, and a CDR3 region of SEQ ID NO: 12;
[0218] 3) a binding molecule comprising a) a light-chain variable region comprising a CDR1 region of SEQ ID NO: 13, a CDR2 region of SEQ ID NO: 14, and a CDR3 region of SEQ ID NO: 15, and b) a heavy-chain variable region comprising a CDR1 region of SEQ ID NO: 16, a CDR2 region of SEQ ID NO: 17, and a CDR3 region of SEQ ID NO: 18;
[0219] 4) a binding molecule comprising a) a light-chain variable region comprising a CDR1 region of SEQ ID NO: 19, a CDR2 region of SEQ ID NO: 20, and a CDR3 region of SEQ ID NO: 21, and b) a heavy-chain variable region comprising a CDR1 region of SEQ ID NO: 22, a CDR2 region of SEQ ID NO: 23, and a CDR3 region of SEQ ID NO: 24;
[0220] 5) a binding molecule comprising a) a light-chain variable region comprising a CDR1 region of SEQ ID NO: 25, a CDR2 region of SEQ ID NO: 26, and a CDR3 region of SEQ ID NO: 27, and b) a heavy-chain variable region comprising a CDR1 region of SEQ ID NO: 28, a CDR2 region of SEQ ID NO: 29, and a CDR3 region of SEQ ID NO: 30;
[0221] 6) a binding molecule comprising a) a light-chain variable region comprising a CDR1 region of SEQ ID NO: 31, a CDR2 region of SEQ ID NO: 32, and a CDR3 region of SEQ ID NO: 33, and b) a heavy-chain variable region comprising a CDR1 region of SEQ ID NO: 34, a CDR2 region of SEQ ID NO: 35, and a CDR3 region of SEQ ID NO: 36;
[0222] 7) a binding molecule comprising a) a light-chain variable region comprising a CDR1 region of SEQ ID NO: 37, a CDR2 region of SEQ ID NO: 38, and a CDR3 region of SEQ ID NO: 39, and b) a heavy-chain variable region comprising a CDR1 region of SEQ ID NO: 40, a CDR2 region of SEQ ID NO: 41, and a CDR3 region of SEQ ID NO: 42;
[0223] 8) a binding molecule comprising a) a light-chain variable region comprising a CDR1 region of SEQ ID NO: 43, a CDR2 region of SEQ ID NO: 44, and a CDR3 region of SEQ ID NO: 45, and b) a heavy-chain variable region comprising a CDR1 region of SEQ ID NO: 46, a CDR2 region of SEQ ID NO: 47, and a CDR3 region of SEQ ID NO: 48;
[0224] 9) a binding molecule comprising a) a light-chain variable region comprising a CDR1 region of SEQ ID NO: 49, a CDR2 region of SEQ ID NO: 50, and a CDR3 region of SEQ ID NO: 51, and b) a heavy-chain variable region comprising a CDR1 region of SEQ ID NO: 52, a CDR2 region of SEQ ID NO: 53, and a CDR3 region of SEQ ID NO: 54;
[0225] 10) a binding molecule comprising a) a light-chain variable region comprising a CDR1 region of SEQ ID NO: 55, a CDR2 region of SEQ ID NO: 56, and a CDR3 region of SEQ ID NO: 57, and b) a heavy-chain variable region comprising a CDR1 region of SEQ ID NO: 58, a CDR2 region of SEQ ID NO: 59, and a CDR3 region of SEQ ID NO: 60;
[0226] 11) a binding molecule comprising a) a light-chain variable region comprising a CDR1 region of SEQ ID NO: 61, a CDR2 region of SEQ ID NO: 62, and a CDR3 region of SEQ ID NO: 63, and b) a heavy-chain variable region comprising a CDR1 region of SEQ ID NO: 64, a CDR2 region of SEQ ID NO: 65, and a CDR3 region of SEQ ID NO: 66;
[0227] 12) a binding molecule comprising a) a light-chain variable region comprising a CDR1 region of SEQ ID NO: 67, a CDR2 region of SEQ ID NO: 68, and a CDR3 region of SEQ ID NO: 69, and b) a heavy-chain variable region comprising a CDR1 region of SEQ ID NO: 70, a CDR2 region of SEQ ID NO: 71, and a CDR3 region of SEQ ID NO: 72;
[0228] 13) a binding molecule comprising a) a light-chain variable region comprising a CDR1 region of SEQ ID NO: 73, a CDR2 region of SEQ ID NO: 74, and a CDR3 region of SEQ ID NO: 75, and b) a heavy-chain variable region comprising a CDR1 region of SEQ ID NO: 76, a CDR2 region of SEQ ID NO: 77, and a CDR3 region of SEQ ID NO: 78;
[0229] 14) a binding molecule comprising a) a light-chain variable region comprising a CDR1 region of SEQ ID NO: 79, a CDR2 region of SEQ ID NO: 80, and a CDR3 region of SEQ ID NO: 81, and b) a heavy-chain variable region comprising a CDR1 region of SEQ ID NO: 82, a CDR2 region of SEQ ID NO: 83, and a CDR3 region of SEQ ID NO: 84;
[0230] 15) a binding molecule comprising a) a light-chain variable region comprising a CDR1 region of SEQ ID NO: 85, a CDR2 region of SEQ ID NO: 86, and a CDR3 region of SEQ ID NO: 87, and b) a heavy-chain variable region comprising a CDR1 region of SEQ ID NO: 88, a CDR2 region of SEQ ID NO: 89, and a CDR3 region of SEQ ID NO: 90;
[0231] 16) a binding molecule comprising a) a light-chain variable region comprising a CDR1 region of SEQ ID NO: 91, a CDR2 region of SEQ ID NO: 92, and a CDR3 region of SEQ ID NO: 93, and b) a heavy-chain variable region comprising a CDR1 region of SEQ ID NO: 94, a CDR2 region of SEQ ID NO: 95, and a CDR3 region of SEQ ID NO: 96;
[0232] 17) a binding molecule comprising a) a light-chain variable region comprising a CDR1 region of SEQ ID NO: 97, a CDR2 region of SEQ ID NO: 98, and a CDR3 region of SEQ ID NO: 99, and b) a heavy-chain variable region comprising a CDR1 region of SEQ ID NO: 100, a CDR2 region of SEQ ID NO: 101, and a CDR3 region of SEQ ID NO: 102;
[0233] 18) a binding molecule comprising a) a light-chain variable region comprising a CDR1 region of SEQ ID NO: 103, a CDR2 region of SEQ ID NO: 104, and a CDR3 region of SEQ ID NO: 105, and b) a heavy-chain variable region comprising a CDR1 region of SEQ ID NO: 106, a CDR2 region of SEQ ID NO: 107, and a CDR3 region of SEQ ID NO: 108;
[0234] 19) a binding molecule comprising a) a light-chain variable region comprising a CDR1 region of SEQ ID NO: 109, CDR2 region of SEQ ID NO: 110, and CDR3 region of SEQ ID NO: 111, and b) a heavy-chain variable region comprising a CDR1 region of SEQ ID NO: 112, a CDR2 region of SEQ ID NO: 113, and a CDR3 region of SEQ ID NO: 114;
[0235] 20) a binding molecule comprising a) a light-chain variable region comprising a CDR1 region of SEQ ID NO: 115, a CDR2 region of SEQ ID NO: 116, and a CDR3 region of SEQ ID NO: 117, and b) a heavy-chain variable region comprising a CDR1 region of SEQ ID NO: 118, a CDR2 region of SEQ ID NO: 119, and a CDR3 region of SEQ ID NO: 120;
[0236] 21) a binding molecule comprising a) a light-chain variable region comprising a CDR1 region of SEQ ID NO: 121, a CDR2 region of SEQ ID NO: 122, and a CDR3 region of SEQ ID NO: 123, and b) a heavy-chain variable region comprising a CDR1 region of SEQ ID NO: 124, a CDR2 region of SEQ ID NO: 125, and a CDR3 region of SEQ ID NO: 126;
[0237] 22) a binding molecule comprising a) a light-chain variable region comprising a CDR1 region of SEQ ID NO: 127, a CDR2 region of SEQ ID NO: 128, and a CDR3 region of SEQ ID NO: 129, and b) a heavy-chain variable region comprising a CDR1 region of SEQ ID NO: 130, a CDR2 region of SEQ ID NO: 131, and a CDR3 region of SEQ ID NO: 132;
[0238] 23) a binding molecule comprising a) a light-chain variable region comprising a CDR1 region of SEQ ID NO: 133, a CDR2 region of SEQ ID NO: 134, and a CDR3 region of SEQ ID NO: 135, and b) a heavy-chain variable region comprising a CDR1 region of SEQ ID NO: 136, a CDR2 region of SEQ ID NO: 137, and a CDR3 region of SEQ ID NO: 138;
[0239] 24) a binding molecule comprising a) a light-chain variable region comprising a CDR1 region of SEQ ID NO: 139, a CDR2 region of SEQ ID NO: 140, and a CDR3 region of SEQ ID NO: 141, and b) a heavy-chain variable region comprising a CDR1 region of SEQ ID NO: 142, a CDR2 region of SEQ ID NO: 143, and a CDR3 region of SEQ ID NO: 144;
[0240] 25) a binding molecule comprising a) a light-chain variable region comprising a CDR1 region of SEQ ID NO: 145, a CDR2 region of SEQ ID NO: 146, and a CDR3 region of SEQ ID NO: 147, and b) a heavy-chain variable region comprising a CDR1 region of SEQ ID NO: 148, a CDR2 region of SEQ ID NO: 149, and a CDR3 region of SEQ ID NO: 150;
[0241] 26) a binding molecule comprising a) a light-chain variable region comprising a CDR1 region of SEQ ID NO: 151, a CDR2 region of SEQ ID NO: 152, and a CDR3 region of SEQ ID NO: 153, and b) a heavy-chain variable region comprising a CDR1 region of SEQ ID NO: 154, a CDR2 region of SEQ ID NO: 155, and a CDR3 region of SEQ ID NO: 156;
[0242] 27) a binding molecule comprising a) a light-chain variable region comprising a CDR1 region of SEQ ID NO: 157, a CDR2 region of SEQ ID NO: 158, and a CDR3 region of SEQ ID NO: 159, and b) a heavy-chain variable region comprising a CDR1 region of SEQ ID NO: 160, a CDR2 region of SEQ ID NO: 161, and a CDR3 region of SEQ ID NO: 162;
[0243] 28) a binding molecule comprising a) a light-chain variable region comprising a CDR1 region of SEQ ID NO: 163, a CDR2 region of SEQ ID NO: 164, and a CDR3 region of SEQ ID NO: 165, and b) a heavy-chain variable region comprising a CDR1 region of SEQ ID NO: 166, a CDR2 region of SEQ ID NO: 167, and a CDR3 region of SEQ ID NO: 168;
[0244] 29) a binding molecule comprising a) a light-chain variable region comprising a CDR1 region of SEQ ID NO: 169, a CDR2 region of SEQ ID NO: 170, and a CDR3 region of SEQ ID NO: 171, and b) a heavy-chain variable region comprising a CDR1 region of SEQ ID NO: 172, a CDR2 region of SEQ ID NO: 173, and a CDR3 region of SEQ ID NO: 174;
[0245] 30) a binding molecule comprising a) a light-chain variable region comprising a CDR1 region of SEQ ID NO: 175, a CDR2 region of SEQ ID NO: 176, and a CDR3 region of SEQ ID NO: 177, and b) a heavy-chain variable region comprising a CDR1 region of SEQ ID NO: 178, a CDR2 region of SEQ ID NO: 179, and a CDR3 region of SEQ ID NO: 180;
[0246] 31) a binding molecule comprising a) a light-chain variable region comprising a CDR1 region of SEQ ID NO: 181, a CDR2 region of SEQ ID NO: 182, and a CDR3 region of SEQ ID NO: 183, and b) a heavy-chain variable region comprising a CDR1 region of SEQ ID NO: 184, a CDR2 region of SEQ ID NO: 185, and a CDR3 region of SEQ ID NO: 186;
[0247] 32) a binding molecule comprising a) a light-chain variable region comprising a CDR1 region of SEQ ID NO: 187, a CDR2 region of SEQ ID NO: 188, and a CDR3 region of SEQ ID NO: 189, and b) a heavy-chain variable region comprising a CDR1 region of SEQ ID NO: 190, a CDR2 region of SEQ ID NO: 191, and a CDR3 region of SEQ ID NO: 192;
[0248] 33) a binding molecule comprising a) a light-chain variable region comprising a CDR1 region of SEQ ID NO: 193, a CDR2 region of SEQ ID NO: 194, and a CDR3 region of SEQ ID NO: 195, and b) a heavy-chain variable region comprising a CDR1 region of SEQ ID NO: 196, a CDR2 region of SEQ ID NO: 197, and a CDR3 region of SEQ ID NO: 198;
[0249] 34) a binding molecule comprising a) a light-chain variable region comprising a CDR1 region of SEQ ID NO: 199, a CDR2 region of SEQ ID NO: 200, and a CDR3 region of SEQ ID NO: 201, and b) a heavy-chain variable region comprising a CDR1 region of SEQ ID NO: 202, a CDR2 region of SEQ ID NO: 203, and a CDR3 region of SEQ ID NO: 204;
[0250] 35) a binding molecule comprising a) a light-chain variable region comprising a CDR1 region of SEQ ID NO: 205, a CDR2 region of SEQ ID NO: 206, and a CDR3 region of SEQ ID NO: 207, and b) a heavy-chain variable region comprising a CDR1 region of SEQ ID NO: 208, a CDR2 region of SEQ ID NO: 209, and a CDR3 region of SEQ ID NO: 210;
[0251] 36) a binding molecule comprising a) a light-chain variable region comprising a CDR1 region of SEQ ID NO: 211, a CDR2 region of SEQ ID NO: 212, and a CDR3 region of SEQ ID NO: 213, and b) a heavy-chain variable region comprising a CDR1 region of SEQ ID NO: 214, a CDR2 region of SEQ ID NO: 215, and a CDR3 region of SEQ ID NO: 216;
[0252] 37) a binding molecule comprising a) a light-chain variable region comprising a CDR1 region of SEQ ID NO: 217, a CDR2 region of SEQ ID NO: 218, and a CDR3 region of SEQ ID NO: 219, and b) a heavy-chain variable region comprising a CDR1 region of SEQ ID NO: 220, a CDR2 region of SEQ ID NO: 221, and a CDR3 region of SEQ ID NO: 222;
[0253] 38) a binding molecule comprising a) a light-chain variable region comprising a CDR1 region of SEQ ID NO: 223, a CDR2 region of SEQ ID NO: 224, and a CDR3 region of SEQ ID NO: 225, and b) a heavy-chain variable region comprising a CDR1 region of SEQ ID NO: 226, a CDR2 region of SEQ ID NO: 227, and a CDR3 region of SEQ ID NO: 228;
[0254] 39) a binding molecule comprising a) a light-chain variable region comprising a CDR1 region of SEQ ID NO: 229, a CDR2 region of SEQ ID NO: 230, and a CDR3 region of SEQ ID NO: 231, and b) a heavy-chain variable region comprising a CDR1 region of SEQ ID NO: 232, a CDR2 region of SEQ ID NO: 233, and a CDR3 region of SEQ ID NO: 234;
[0255] 40) a binding molecule comprising a) a light-chain variable region comprising a CDR1 region of SEQ ID NO: 235, a CDR2 region of SEQ ID NO: 236, and a CDR3 region of SEQ ID NO: 237, and b) a heavy-chain variable region comprising a CDR1 region of SEQ ID NO: 238, a CDR2 region of SEQ ID NO: 239, and a CDR3 region of SEQ ID NO: 240;
[0256] 41) a binding molecule comprising a) a light-chain variable region comprising a CDR1 region of SEQ ID NO: 241, a CDR2 region of SEQ ID NO: 242, and a CDR3 region of SEQ ID NO: 243, and b) a heavy-chain variable region comprising a CDR1 region of SEQ ID NO: 244, a CDR2 region of SEQ ID NO: 245, and a CDR3 region of SEQ ID NO: 246;
[0257] 42) a binding molecule comprising a) a light-chain variable region comprising a CDR1 region of SEQ ID NO: 247, a CDR2 region of SEQ ID NO: 248, and a CDR3 region of SEQ ID NO: 249, and b) a heavy-chain variable region comprising a CDR1 region of SEQ ID NO: 250, a CDR2 region of SEQ ID NO: 251, and a CDR3 region of SEQ ID NO: 252;
[0258] 43) a binding molecule comprising a) a light-chain variable region comprising a CDR1 region of SEQ ID NO: 253, a CDR2 region of SEQ ID NO: 254, and a CDR3 region of SEQ ID NO: 255, and b) a heavy-chain variable region comprising a CDR1 region of SEQ ID NO: 256, a CDR2 region of SEQ ID NO: 257, and a CDR3 region of SEQ ID NO: 258;
[0259] 44) a binding molecule comprising a) a light-chain variable region comprising a CDR1 region of SEQ ID NO: 259, a CDR2 region of SEQ ID NO: 260, and a CDR3 region of SEQ ID NO: 261, and b) a heavy-chain variable region comprising a CDR1 region of SEQ ID NO: 262, a CDR2 region of SEQ ID NO: 263, and a CDR3 region of SEQ ID NO: 264;
[0260] 45) a binding molecule comprising a) a light-chain variable region comprising a CDR1 region of SEQ ID NO: 265, a CDR2 region of SEQ ID NO: 266, and a CDR3 region of SEQ ID NO: 267, and b) a heavy-chain variable region comprising a CDR1 region of SEQ ID NO: 268, a CDR2 region of SEQ ID NO: 269, and a CDR3 region of SEQ ID NO: 270;
[0261] 46) a binding molecule comprising a) a light-chain variable region comprising a CDR1 region of SEQ ID NO: 271, a CDR2 region of SEQ ID NO: 272, and a CDR3 region of SEQ ID NO: 273, and b) a heavy-chain variable region comprising a CDR1 region of SEQ ID NO: 274, a CDR2 region of SEQ ID NO: 275, and a CDR3 region of SEQ ID NO: 276;
[0262] 47) a binding molecule comprising a) a light-chain variable region comprising a CDR1 region of SEQ ID NO: 277, a CDR2 region of SEQ ID NO: 278, and a CDR3 region of SEQ ID NO: 279, and b) a heavy-chain variable region comprising a CDR1 region of SEQ ID NO: 280, a CDR2 region of SEQ ID NO: 281, and a CDR3 region of SEQ ID NO: 282;
[0263] 48) a binding molecule comprising a) a light-chain variable region comprising a CDR1 region of SEQ ID NO: 283, a CDR2 region of SEQ ID NO: 284, and a CDR3 region of SEQ ID NO: 285, and b) a heavy-chain variable region comprising a CDR1 region of SEQ ID NO: 286, a CDR2 region of SEQ ID NO: 287, and a CDR3 region of SEQ ID NO: 288;
[0264] 49) a binding molecule comprising a) a light-chain variable region comprising a CDR1 region of SEQ ID NO: 289, a CDR2 region of SEQ ID NO: 290, and a CDR3 region of SEQ ID NO: 291, and b) a heavy-chain variable region comprising a CDR1 region of SEQ ID NO: 292, a CDR2 region of SEQ ID NO: 293, and a CDR3 region of SEQ ID NO: 294;
[0265] 50) a binding molecule comprising a) a light-chain variable region comprising a CDR1 region of SEQ ID NO: 295, a CDR2 region of SEQ ID NO: 296, and a CDR3 region of SEQ ID NO: 297, and b) a heavy-chain variable region comprising a CDR1 region of SEQ ID NO: 298, a CDR2 region of SEQ ID NO: 299, and a CDR3 region of SEQ ID NO: 300;
[0266] 51) a binding molecule comprising a) a light-chain variable region comprising a CDR1 region of SEQ ID NO: 301, a CDR2 region of SEQ ID NO: 302, and a CDR3 region of SEQ ID NO: 303, and b) a heavy-chain variable region comprising a CDR1 region of SEQ ID NO: 304, a CDR2 region of SEQ ID NO: 305, and a CDR3 region of SEQ ID NO: 306;
[0267] 52) a binding molecule comprising a) a light-chain variable region comprising a CDR1 region of SEQ ID NO: 307, a CDR2 region of SEQ ID NO: 308, and a CDR3 region of SEQ ID NO: 309, and b) a heavy-chain variable region comprising a CDR1 region of SEQ ID NO: 310, a CDR2 region of SEQ ID NO: 311, and a CDR3 region of SEQ ID NO: 312;
[0268] 53) a binding molecule comprising a) a light-chain variable region comprising a CDR1 region of SEQ ID NO: 313, a CDR2 region of SEQ ID NO: 314, and a CDR3 region of SEQ ID NO: 315, and b) a heavy-chain variable region comprising a CDR1 region of SEQ ID NO: 316, a CDR2 region of SEQ ID NO: 317, and a CDR3 region of SEQ ID NO: 318;
[0269] 54) a binding molecule comprising a) a light-chain variable region comprising a CDR1 region of SEQ ID NO: 319, a CDR2 region of SEQ ID NO: 320, and a CDR3 region of SEQ ID NO: 321, and b) a heavy-chain variable region comprising a CDR1 region of SEQ ID NO: 322, a CDR2 region of SEQ ID NO: 323, and a CDR3 region of SEQ ID NO: 324;
[0270] 55) a binding molecule comprising a) a light-chain variable region comprising a CDR1 region of SEQ ID NO: 325, a CDR2 region of SEQ ID NO: 326, and a CDR3 region of SEQ ID NO: 327, and b) a heavy-chain variable region comprising a CDR1 region of SEQ ID NO: 328, a CDR2 region of SEQ ID NO: 329, and a CDR3 region of SEQ ID NO: 330;
[0271] 56) a binding molecule comprising a) a light-chain variable region comprising a CDR1 region of SEQ ID NO: 331, a CDR2 region of SEQ ID NO: 332, and a CDR3 region of SEQ ID NO: 333, and b) a heavy-chain variable region comprising a CDR1 region of SEQ ID NO: 334, a CDR2 region of SEQ ID NO: 335, and a CDR3 region of SEQ ID NO: 336;
[0272] 57) a binding molecule comprising a) a light-chain variable region comprising a CDR1 region of SEQ ID NO: 337, a CDR2 region of SEQ ID NO: 338, and a CDR3 region of SEQ ID NO: 339, and b) a heavy-chain variable region comprising a CDR1 region of SEQ ID NO: 340, a CDR2 region of SEQ ID NO: 341, and a CDR3 region of SEQ ID NO: 342;
[0273] 58) a binding molecule comprising a) a light-chain variable region comprising a CDR1 region of SEQ ID NO: 343, a CDR2 region of SEQ ID NO: 344, and a CDR3 region of SEQ ID NO: 345, and b) a heavy-chain variable region comprising a CDR1 region of SEQ ID NO: 346, a CDR2 region of SEQ ID NO: 347, and a CDR3 region of SEQ ID NO: 348;
[0274] 59) a binding molecule comprising a) a light-chain variable region comprising a CDR1 region of SEQ ID NO: 349, a CDR2 region of SEQ ID NO: 350, and a CDR3 region of SEQ ID NO: 351, and b) a heavy-chain variable region comprising a CDR1 region of SEQ ID NO: 352, a CDR2 region of SEQ ID NO: 353, and a CDR3 region of SEQ ID NO: 354;
[0275] 60) a binding molecule comprising a) a light-chain variable region comprising a CDR1 region of SEQ ID NO: 355, a CDR2 region of SEQ ID NO: 356, and a CDR3 region of SEQ ID NO: 357, and b) a heavy-chain variable region comprising a CDR1 region of SEQ ID NO: 358, a CDR2 region of SEQ ID NO: 359, and a CDR3 region of SEQ ID NO: 360;
[0276] 61) a binding molecule comprising a) a light-chain variable region comprising a CDR1 region of SEQ ID NO: 361, a CDR2 region of SEQ ID NO: 362, and a CDR3 region of SEQ ID NO: 363, and b) a heavy-chain variable region comprising a CDR1 region of SEQ ID NO: 364, a CDR2 region of SEQ ID NO: 365, and a CDR3 region of SEQ ID NO: 366;
[0277] 62) a binding molecule comprising a) a light-chain variable region comprising a CDR1 region of SEQ ID NO: 367, a CDR2 region of SEQ ID NO: 368, and a CDR3 region of SEQ ID NO: 369, and b) a heavy-chain variable region comprising a CDR1 region of SEQ ID NO: 370, a CDR2 region of SEQ ID NO: 371, and a CDR3 region of SEQ ID NO: 372;
[0278] 63) a binding molecule comprising a) a light-chain variable region comprising a CDR1 region of SEQ ID NO: 373, a CDR2 region of SEQ ID NO: 374, and a CDR3 region of SEQ ID NO: 375, and b) a heavy-chain variable region comprising a CDR1 region of SEQ ID NO: 376, a CDR2 region of SEQ ID NO: 377, and a CDR3 region of SEQ ID NO: 378;
[0279] 64) a binding molecule comprising a) a light-chain variable region comprising a CDR1 region of SEQ ID NO: 379, a CDR2 region of SEQ ID NO: 380, and a CDR3 region of SEQ ID NO: 381, and b) a heavy-chain variable region comprising a CDR1 region of SEQ ID NO: 382, a CDR2 region of SEQ ID NO: 383, and a CDR3 region of SEQ ID NO: 384;
[0280] 65) a binding molecule comprising a) a light-chain variable region comprising a CDR1 region of SEQ ID NO: 385, a CDR2 region of SEQ ID NO: 386, and a CDR3 region of SEQ ID NO: 387, and b) a heavy-chain variable region comprising a CDR1 region of SEQ ID NO: 388, a CDR2 region of SEQ ID NO: 389, and a CDR3 region of SEQ ID NO: 390;
[0281] 66) a binding molecule comprising a) a light-chain variable region comprising a CDR1 region of SEQ ID NO: 391, a CDR2 region of SEQ ID NO: 392, and a CDR3 region of SEQ ID NO: 393, and b) a heavy-chain variable region comprising a CDR1 region of SEQ ID NO: 394, a CDR2 region of SEQ ID NO: 395, and a CDR3 region of SEQ ID NO: 396;
[0282] 67) a binding molecule comprising a) a light-chain variable region comprising a CDR1 region of SEQ ID NO: 397, a CDR2 region of SEQ ID NO: 398, and a CDR3 region of SEQ ID NO: 399, and b) a heavy-chain variable region comprising a CDR1 region of SEQ ID NO: 400, a CDR2 region of SEQ ID NO: 401, and a CDR3 region of SEQ ID NO: 402;
[0283] 68) a binding molecule comprising a) a light-chain variable region comprising a CDR1 region of SEQ ID NO: 403, a CDR2 region of SEQ ID NO: 404, and a CDR3 region of SEQ ID NO: 405, and b) a heavy-chain variable region comprising a CDR1 region of SEQ ID NO: 406, a CDR2 region of SEQ ID NO: 407, and a CDR3 region of SEQ ID NO: 408;
[0284] 69) a binding molecule comprising a) a light-chain variable region comprising a CDR1 region of SEQ ID NO: 409, a CDR2 region of SEQ ID NO: 410, and a CDR3 region of SEQ ID NO: 411, and b) a heavy-chain variable region comprising a CDR1 region of SEQ ID NO: 412, a CDR2 region of SEQ ID NO: 413, and a CDR3 region of SEQ ID NO: 414;
[0285] 70) a binding molecule comprising a) a light-chain variable region comprising a CDR1 region of SEQ ID NO: 415, a CDR2 region of SEQ ID NO: 416, and a CDR3 region of SEQ ID NO: 417, and b) a heavy-chain variable region comprising a CDR1 region of SEQ ID NO: 418, a CDR2 region of SEQ ID NO: 419, and a CDR3 region of SEQ ID NO: 420;
[0286] 71) a binding molecule comprising a) a light-chain variable region comprising a CDR1 region of SEQ ID NO: 421, a CDR2 region of SEQ ID NO: 422, and a CDR3 region of SEQ ID NO: 423, and b) a heavy-chain variable region comprising a CDR1 region of SEQ ID NO: 424, a CDR2 region of SEQ ID NO: 425, and a CDR3 region of SEQ ID NO: 426;
[0287] 72) a binding molecule comprising a) a light-chain variable region comprising a CDR1 region of SEQ ID NO: 427, a CDR2 region of SEQ ID NO: 428, and a CDR3 region of SEQ ID NO: 429, and b) a heavy-chain variable region comprising a CDR1 region of SEQ ID NO: 430, a CDR2 region of SEQ ID NO: 431, and a CDR3 region of SEQ ID NO: 432;
[0288] 73) a binding molecule comprising a) a light-chain variable region comprising a CDR1 region of SEQ ID NO: 433, a CDR2 region of SEQ ID NO: 434, and a CDR3 region of SEQ ID NO: 435, and b) a heavy-chain variable region comprising a CDR1 region of SEQ ID NO: 436, a CDR2 region of SEQ ID NO: 437, and a CDR3 region of SEQ ID NO: 438;
[0289] 74) a binding molecule comprising a) a light-chain variable region comprising a CDR1 region of SEQ ID NO: 439, a CDR2 region of SEQ ID NO: 440, and a CDR3 region of SEQ ID NO: 441, and b) a heavy-chain variable region comprising a CDR1 region of SEQ ID NO: 442, a CDR2 region of SEQ ID NO: 443, and a CDR3 region of SEQ ID NO: 444;
[0290] 75) a binding molecule comprising a) a light-chain variable region comprising a CDR1 region of SEQ ID NO: 445, a CDR2 region of SEQ ID NO: 446, and a CDR3 region of SEQ ID NO: 447, and b) a heavy-chain variable region comprising a CDR1 region of SEQ ID NO: 448, a CDR2 region of SEQ ID NO: 449, and a CDR3 region of SEQ ID NO: 450;
[0291] 76) a binding molecule comprising a) a light-chain variable region comprising a CDR1 region of SEQ ID NO: 451, a CDR2 region of SEQ ID NO: 452, and a CDR3 region of SEQ ID NO: 453, and b) a heavy-chain variable region comprising a CDR1 region of SEQ ID NO: 454, a CDR2 region of SEQ ID NO: 455, and a CDR3 region of SEQ ID NO: 456;
[0292] 77) a binding molecule comprising a) a light-chain variable region comprising a CDR1 region of SEQ ID NO: 457, a CDR2 region of SEQ ID NO: 458, and a CDR3 region of SEQ ID NO: 459, and b) a heavy-chain variable region comprising a CDR1 region of SEQ ID NO: 460, a CDR2 region of SEQ ID NO: 461, and a CDR3 region of SEQ ID NO: 462;
[0293] 78) a binding molecule comprising a) a light-chain variable region comprising a CDR1 region of SEQ ID NO: 463, a CDR2 region of SEQ ID NO: 464, and a CDR3 region of SEQ ID NO: 465, and b) a heavy-chain variable region comprising a CDR1 region of SEQ ID NO: 466, a CDR2 region of SEQ ID NO: 467, and a CDR3 region of SEQ ID NO: 468;
[0294] 79) a binding molecule comprising a) a light-chain variable region comprising a CDR1 region of SEQ ID NO: 469, a CDR2 region of SEQ ID NO: 470, and a CDR3 region of SEQ ID NO: 471, and b) a heavy-chain variable region comprising a CDR1 region of SEQ ID NO: 472, a CDR2 region of SEQ ID NO: 473, and a CDR3 region of SEQ ID NO: 474;
[0295] 80) a binding molecule comprising a) a light-chain variable region comprising a CDR1 region of SEQ ID NO: 475, a CDR2 region of SEQ ID NO: 476, and a CDR3 region of SEQ ID NO: 477, and b) a heavy-chain variable region comprising a CDR1 region of SEQ ID NO: 478, a CDR2 region of SEQ ID NO: 479, and a CDR3 region of SEQ ID NO: 480;
[0296] 81) a binding molecule comprising a) a light-chain variable region comprising a CDR1 region of SEQ ID NO: 481, a CDR2 region of SEQ ID NO: 482, and a CDR3 region of SEQ ID NO: 483, and b) a heavy-chain variable region comprising a CDR1 region of SEQ ID NO: 484, a CDR2 region of SEQ ID NO: 485, and a CDR3 region of SEQ ID NO: 486;
[0297] 82) a binding molecule comprising a) a light-chain variable region comprising a CDR1 region of SEQ ID NO: 487, a CDR2 region of SEQ ID NO: 488, and a CDR3 region of SEQ ID NO: 489, and b) a heavy-chain variable region comprising a CDR1 region of SEQ ID NO: 490, a CDR2 region of SEQ ID NO: 491, and a CDR3 region of SEQ ID NO: 492;
[0298] 83) a binding molecule comprising a) a light-chain variable region comprising a CDR1 region of SEQ ID NO: 493, a CDR2 region of SEQ ID NO: 494, and a CDR3 region of SEQ ID NO: 495, and b) a heavy-chain variable region comprising a CDR1 region of SEQ ID NO: 496, a CDR2 region of SEQ ID NO: 497, and a CDR3 region of SEQ ID NO: 498;
[0299] 84) a binding molecule comprising a) a light-chain variable region comprising a CDR1 region of SEQ ID NO: 499, a CDR2 region of SEQ ID NO: 500, and a CDR3 region of SEQ ID NO: 501, and b) a heavy-chain variable region comprising a CDR1 region of SEQ ID NO: 502, a CDR2 region of SEQ ID NO: 503, and a CDR3 region of SEQ ID NO: 504;
[0300] 85) a binding molecule comprising a) a light-chain variable region comprising a CDR1 region of SEQ ID NO: 505, a CDR2 region of SEQ ID NO: 506, and a CDR3 region of SEQ ID NO: 507, and b) a heavy-chain variable region comprising a CDR1 region of SEQ ID NO: 508, a CDR2 region of SEQ ID NO: 509, and a CDR3 region of SEQ ID NO: 510;
[0301] 86) a binding molecule comprising a) a light-chain variable region comprising a CDR1 region of SEQ ID NO: 511, a CDR2 region of SEQ ID NO: 512, and a CDR3 region of SEQ ID NO: 513, and b) a heavy-chain variable region comprising a CDR1 region of SEQ ID NO: 514, a CDR2 region of SEQ ID NO: 515, and a CDR3 region of SEQ ID NO: 516;
[0302] 87) a binding molecule comprising a) a light-chain variable region comprising a CDR1 region of SEQ ID NO: 517, a CDR2 region of SEQ ID NO: 518, and a CDR3 region of SEQ ID NO: 519, and b) a heavy-chain variable region comprising a CDR1 region of SEQ ID NO: 520, a CDR2 region of SEQ ID NO: 521, and a CDR3 region of SEQ ID NO: 522;
[0303] 88) a binding molecule comprising a) a light-chain variable region comprising a CDR1 region of SEQ ID NO: 523, a CDR2 region of SEQ ID NO: 524, and a CDR3 region of SEQ ID NO: 525, and b) a heavy-chain variable region comprising a CDR1 region of SEQ ID NO: 526, a CDR2 region of SEQ ID NO: 527, and a CDR3 region of SEQ ID NO: 528;
[0304] 89) a binding molecule comprising a) a light-chain variable region comprising a CDR1 region of SEQ ID NO: 529, a CDR2 region of SEQ ID NO: 530, and a CDR3 region of SEQ ID NO: 531, and b) a heavy-chain variable region comprising a CDR1 region of SEQ ID NO: 532, a CDR2 region of SEQ ID NO: 533, and a CDR3 region of SEQ ID NO: 534;
[0305] 90) a binding molecule comprising a) a light-chain variable region comprising a CDR1 region of SEQ ID NO: 535, a CDR2 region of SEQ ID NO: 536, and a CDR3 region of SEQ ID NO: 537, and b) a heavy-chain variable region comprising a CDR1 region of SEQ ID NO: 538, a CDR2 region of SEQ ID NO: 539, and a CDR3 region of SEQ ID NO: 540;
[0306] 91) a binding molecule comprising a) a light-chain variable region comprising a CDR1 region of SEQ ID NO: 541, a CDR2 region of SEQ ID NO: 542, and a CDR3 region of SEQ ID NO: 543, and b) a heavy-chain variable region comprising a CDR1 region of SEQ ID NO: 544, a CDR2 region of SEQ ID NO: 545, and a CDR3 region of SEQ ID NO: 546;
[0307] 92) a binding molecule comprising a) a light-chain variable region comprising a CDR1 region of SEQ ID NO: 547, a CDR2 region of SEQ ID NO: 548, and a CDR3 region of SEQ ID NO: 549, and b) a heavy-chain variable region comprising a CDR1 region of SEQ ID NO: 550, a CDR2 region of SEQ ID NO: 551, and a CDR3 region of SEQ ID NO: 552;
[0308] 93) a binding molecule comprising a) a light-chain variable region comprising a CDR1 region of SEQ ID NO: 553, a CDR2 region of SEQ ID NO: 554, and a CDR3 region of SEQ ID NO: 555, and b) a heavy-chain variable region comprising a CDR1 region of SEQ ID NO: 556, a CDR2 region of SEQ ID NO: 557, and a CDR3 region of SEQ ID NO: 558;
[0309] 94) a binding molecule comprising a) a light-chain variable region comprising a CDR1 region of SEQ ID NO: 559, a CDR2 region of SEQ ID NO: 560, and a CDR3 region of SEQ ID NO: 561, and b) a heavy-chain variable region comprising a CDR1 region of SEQ ID NO: 562, a CDR2 region of SEQ ID NO: 563, and a CDR3 region of SEQ ID NO: 564;
[0310] 95) a binding molecule comprising a) a light-chain variable region comprising a CDR1 region of SEQ ID NO: 565, a CDR2 region of SEQ ID NO: 566, and a CDR3 region of SEQ ID NO: 567, and b) a heavy-chain variable region comprising a CDR1 region of SEQ ID NO: 568, a CDR2 region of SEQ ID NO: 569, and a CDR3 region of SEQ ID NO: 570;
[0311] 96) a binding molecule comprising a) a light-chain variable region comprising a CDR1 region of SEQ ID NO: 571, a CDR2 region of SEQ ID NO: 572, and a CDR3 region of SEQ ID NO: 573, and b) a heavy-chain variable region comprising a CDR1 region of SEQ ID NO: 574, a CDR2 region of SEQ ID NO: 575, and a CDR3 region of SEQ ID NO: 576;
[0312] 97) a binding molecule comprising a) a light-chain variable region comprising a CDR1 region of SEQ ID NO: 577, a CDR2 region of SEQ ID NO: 578, and a CDR3 region of SEQ ID NO: 579, and b) a heavy-chain variable region comprising a CDR1 region of SEQ ID NO: 580, a CDR2 region of SEQ ID NO: 581, and a CDR3 region of SEQ ID NO: 582;
[0313] 98) a binding molecule comprising a) a light-chain variable region comprising a CDR1 region of SEQ ID NO: 583, a CDR2 region of SEQ ID NO: 584, and a CDR3 region of SEQ ID NO: 585, and b) a heavy-chain variable region comprising a CDR1 region of SEQ ID NO: 586, a CDR2 region of SEQ ID NO: 587, and a CDR3 region of SEQ ID NO: 588;
[0314] 99) a binding molecule comprising a) a light-chain variable region comprising a CDR1 region of SEQ ID NO: 589, a CDR2 region of SEQ ID NO: 590, and a CDR3 region of SEQ ID NO: 591, and b) a heavy-chain variable region comprising a CDR1 region of SEQ ID NO: 592, a CDR2 region of SEQ ID NO: 593, and a CDR3 region of SEQ ID NO: 594;
[0315] 100) a binding molecule comprising a) a light-chain variable region comprising a CDR1 region of SEQ ID NO: 595, a CDR2 region of SEQ ID NO: 596, and a CDR3 region of SEQ ID NO: 597, and b) a heavy-chain variable region comprising a CDR1 region of SEQ ID NO: 598, a CDR2 region of SEQ ID NO: 599, and a CDR3 region of SEQ ID NO: 600;
[0316] 101) a binding molecule comprising a) a light-chain variable region comprising a CDR1 region of SEQ ID NO: 601, a CDR2 region of SEQ ID NO: 602, and a CDR3 region of SEQ ID NO: 603, and b) a heavy-chain variable region comprising a CDR1 region of SEQ ID NO: 604, a CDR2 region of SEQ ID NO: 605, and a CDR3 region of SEQ ID NO: 606;
[0317] 102) a binding molecule comprising a) a light-chain variable region comprising a CDR1 region of SEQ ID NO: 607, a CDR2 region of SEQ ID NO: 608, and a CDR3 region of SEQ ID NO: 609, and b) a heavy-chain variable region comprising a CDR1 region of SEQ ID NO: 610, a CDR2 region of SEQ ID NO: 611, and a CDR3 region of SEQ ID NO: 612;
[0318] 103) a binding molecule comprising a) a light-chain variable region comprising a CDR1 region of SEQ ID NO: 613, a CDR2 region of SEQ ID NO: 614, and a CDR3 region of SEQ ID NO: 615, and b) a heavy-chain variable region comprising a CDR1 region of SEQ ID NO: 616, a CDR2 region of SEQ ID NO: 617, and a CDR3 region of SEQ ID NO: 618;
[0319] 104) a binding molecule comprising a) a light-chain variable region comprising a CDR1 region of SEQ ID NO: 619, a CDR2 region of SEQ ID NO: 620, and a CDR3 region of SEQ ID NO: 621, and b) a heavy-chain variable region comprising a CDR1 region of SEQ ID NO: 622, a CDR2 region of SEQ ID NO: 623, and a CDR3 region of SEQ ID NO: 624;
[0320] 105) a binding molecule comprising a) a light-chain variable region comprising a CDR1 region of SEQ ID NO: 625, a CDR2 region of SEQ ID NO: 626, and a CDR3 region of SEQ ID NO: 627, and b) a heavy-chain variable region comprising a CDR1 region of SEQ ID NO: 628, a CDR2 region of SEQ ID NO: 629, and a CDR3 region of SEQ ID NO: 630;
[0321] 106) a binding molecule comprising a) a light-chain variable region comprising a CDR1 region of SEQ ID NO: 631, a CDR2 region of SEQ ID NO: 632, and a CDR3 region of SEQ ID NO: 633, and b) a heavy-chain variable region comprising a CDR1 region of SEQ ID NO: 634, a CDR2 region of SEQ ID NO: 635, and a CDR3 region of SEQ ID NO: 636;
[0322] 107) a binding molecule comprising a) a light-chain variable region comprising a CDR1 region of SEQ ID NO: 637, a CDR2 region of SEQ ID NO: 638, and a CDR3 region of SEQ ID NO: 639, and b) a heavy-chain variable region comprising a CDR1 region of SEQ ID NO: 640, a CDR2 region of SEQ ID NO: 641, and a CDR3 region of SEQ ID NO: 642;
[0323] 108) a binding molecule comprising a) a light-chain variable region comprising a CDR1 region of SEQ ID NO: 643, a CDR2 region of SEQ ID NO: 644, and a CDR3 region of SEQ ID NO: 645, and b) a heavy-chain variable region comprising a CDR1 region of SEQ ID NO: 646, a CDR2 region of SEQ ID NO: 647, and a CDR3 region of SEQ ID NO: 648;
[0324] 109) a binding molecule comprising a) a light-chain variable region comprising a CDR1 region of SEQ ID NO: 649, a CDR2 region of SEQ ID NO: 650, and a CDR3 region of SEQ ID NO: 651, and b) a heavy-chain variable region comprising a CDR1 region of SEQ ID NO: 652, a CDR2 region of SEQ ID NO: 653, and a CDR3 region of SEQ ID NO: 654;
[0325] 110) a binding molecule comprising a) a light-chain variable region comprising a CDR1 region of SEQ ID NO: 655, a CDR2 region of SEQ ID NO: 656, and a CDR3 region of SEQ ID NO: 657, and b) a heavy-chain variable region comprising a CDR1 region of SEQ ID NO: 658, a CDR2 region of SEQ ID NO: 659, and a CDR3 region of SEQ ID NO: 660;
[0326] 111) a binding molecule comprising a) a light-chain variable region comprising a CDR1 region of SEQ ID NO: 661, a CDR2 region of SEQ ID NO: 662, and a CDR3 region of SEQ ID NO: 663, and b) a heavy-chain variable region comprising a CDR1 region of SEQ ID NO: 664, a CDR2 region of SEQ ID NO: 665, and a CDR3 region of SEQ ID NO: 666;
[0327] 112) a binding molecule comprising a) a light-chain variable region comprising a CDR1 region of SEQ ID NO: 667, a CDR2 region of SEQ ID NO: 668, and a CDR3 region of SEQ ID NO: 669, and b) a heavy-chain variable region comprising a CDR1 region of SEQ ID NO: 670, a CDR2 region of SEQ ID NO: 671, and a CDR3 region of SEQ ID NO: 672;
[0328] 113) a binding molecule comprising a) a light-chain variable region comprising a CDR1 region of SEQ ID NO: 673, a CDR2 region of SEQ ID NO: 674, and a CDR3 region of SEQ ID NO: 675, and b) a heavy-chain variable region comprising a CDR1 region of SEQ ID NO: 676, a CDR2 region of SEQ ID NO: 677, and a CDR3 region of SEQ ID NO: 678;
[0329] 114) a binding molecule comprising a) a light-chain variable region comprising a CDR1 region of SEQ ID NO: 679, a CDR2 region of SEQ ID NO: 680, and a CDR3 region of SEQ ID NO: 681, and b) a heavy-chain variable region comprising a CDR1 region of SEQ ID NO: 682, a CDR2 region of SEQ ID NO: 683, and a CDR3 region of SEQ ID NO: 684;
[0330] 115) a binding molecule comprising a) a light-chain variable region comprising a CDR1 region of SEQ ID NO: 685, a CDR2 region of SEQ ID NO: 686, and a CDR3 region of SEQ ID NO: 687, and b) a heavy-chain variable region comprising a CDR1 region of SEQ ID NO: 688, a CDR2 region of SEQ ID NO: 689, and a CDR3 region of SEQ ID NO: 690;
[0331] 116) a binding molecule comprising a) a light-chain variable region comprising a CDR1 region of SEQ ID NO: 691, a CDR2 region of SEQ ID NO: 692, and a CDR3 region of SEQ ID NO: 693, and b) a heavy-chain variable region comprising a CDR1 region of SEQ ID NO: 694, a CDR2 region of SEQ ID NO: 695, and a CDR3 region of SEQ ID NO: 696;
[0332] 117) a binding molecule comprising a) a light-chain variable region comprising a CDR1 region of SEQ ID NO: 697, a CDR2 region of SEQ ID NO: 698, and a CDR3 region of SEQ ID NO: 699, and b) a heavy-chain variable region comprising a CDR1 region of SEQ ID NO: 700, a CDR2 region of SEQ ID NO: 701, and a CDR3 region of SEQ ID NO: 702;
[0333] 118) a binding molecule comprising a) a light-chain variable region comprising a CDR1 region of SEQ ID NO: 703, a CDR2 region of SEQ ID NO: 704, and a CDR3 region of SEQ ID NO: 705, and b) a heavy-chain variable region comprising a CDR1 region of SEQ ID NO: 706, a CDR2 region of SEQ ID NO: 707, and a CDR3 region of SEQ ID NO: 708;
[0334] 119) a binding molecule comprising a) a light-chain variable region comprising a CDR1 region of SEQ ID NO: 709, a CDR2 region of SEQ ID NO: 710, and a CDR3 region of SEQ ID NO: 711, and b) a heavy-chain variable region comprising a CDR1 region of SEQ ID NO: 712, a CDR2 region of SEQ ID NO: 713, and a CDR3 region of SEQ ID NO: 714;
[0335] 120) a binding molecule comprising a) a light-chain variable region comprising a CDR1 region of SEQ ID NO: 715, a CDR2 region of SEQ ID NO: 716, and a CDR3 region of SEQ ID NO: 717, and b) a heavy-chain variable region comprising a CDR1 region of SEQ ID NO: 718, a CDR2 region of SEQ ID NO: 719, and a CDR3 region of SEQ ID NO: 720;
[0336] 121) a binding molecule comprising a) a light-chain variable region comprising a CDR1 region of SEQ ID NO: 721, a CDR2 region of SEQ ID NO: 722, and a CDR3 region of SEQ ID NO: 723, and b) a heavy-chain variable region comprising a CDR1 region of SEQ ID NO: 724, a CDR2 region of SEQ ID NO: 725, and a CDR3 region of SEQ ID NO: 726;
[0337] 122) a binding molecule comprising a) a light-chain variable region comprising a CDR1 region of SEQ ID NO: 727, a CDR2 region of SEQ ID NO: 728, and a CDR3 region of SEQ ID NO: 729, and b) a heavy-chain variable region comprising a CDR1 region of SEQ ID NO: 730, a CDR2 region of SEQ ID NO: 731, and a CDR3 region of SEQ ID NO: 732;
[0338] 123) a binding molecule comprising a) a light-chain variable region comprising a CDR1 region of SEQ ID NO: 733, a CDR2 region of SEQ ID NO: 734, and a CDR3 region of SEQ ID NO: 735, and b) a heavy-chain variable region comprising a CDR1 region of SEQ ID NO: 736, a CDR2 region of SEQ ID NO: 737, and a CDR3 region of SEQ ID NO: 738;
[0339] 124) a binding molecule comprising a) a light-chain variable region comprising a CDR1 region of SEQ ID NO: 739, a CDR2 region of SEQ ID NO: 740, and a CDR3 region of SEQ ID NO: 741, and b) a heavy-chain variable region comprising a CDR1 region of SEQ ID NO: 742, a CDR2 region of SEQ ID NO: 743, and a CDR3 region of SEQ ID NO: 744;
[0340] 125) a binding molecule comprising a) a light-chain variable region comprising a CDR1 region of SEQ ID NO: 745, a CDR2 region of SEQ ID NO: 746, and a CDR3 region of SEQ ID NO: 747, and b) a heavy-chain variable region comprising a CDR1 region of SEQ ID NO: 748, a CDR2 region of SEQ ID NO: 749, and a CDR3 region of SEQ ID NO: 750;
[0341] 126) a binding molecule comprising a) a light-chain variable region comprising a CDR1 region of SEQ ID NO: 751, a CDR2 region of SEQ ID NO: 752, and a CDR3 region of SEQ ID NO: 753, and b) a heavy-chain variable region comprising a CDR1 region of SEQ ID NO: 754, a CDR2 region of SEQ ID NO: 755, and a CDR3 region of SEQ ID NO: 756;
[0342] 127) a binding molecule comprising a) a light-chain variable region comprising a CDR1 region of SEQ ID NO: 757, a CDR2 region of SEQ ID NO: 758, and a CDR3 region of SEQ ID NO: 759, and b) a heavy-chain variable region comprising a CDR1 region of SEQ ID NO: 760, a CDR2 region of SEQ ID NO: 761, and a CDR3 region of SEQ ID NO: 762;
[0343] 128) a binding molecule comprising a) a light-chain variable region comprising a CDR1 region of SEQ ID NO: 763, a CDR2 region of SEQ ID NO: 764, and a CDR3 region of SEQ ID NO: 765, and b) a heavy-chain variable region comprising a CDR1 region of SEQ ID NO: 766, a CDR2 region of SEQ ID NO: 767, and a CDR3 region of SEQ ID NO: 768;
[0344] 129) a binding molecule comprising a) a light-chain variable region comprising a CDR1 region of SEQ ID NO: 769, a CDR2 region of SEQ ID NO: 770, and a CDR3 region of SEQ ID NO: 771, and b) a heavy-chain variable region comprising a CDR1 region of SEQ ID NO: 772, a CDR2 region of SEQ ID NO: 773, and a CDR3 region of SEQ ID NO: 774;
[0345] 130) a binding molecule comprising a) a light-chain variable region comprising a CDR1 region of SEQ ID NO: 775, a CDR2 region of SEQ ID NO: 776, and a CDR3 region of SEQ ID NO: 777, and b) a heavy-chain variable region comprising a CDR1 region of SEQ ID NO: 778, a CDR2 region of SEQ ID NO: 779, and a CDR3 region of SEQ ID NO: 780;
[0346] 131) a binding molecule comprising a) a light-chain variable region comprising a CDR1 region of SEQ ID NO: 781, a CDR2 region of SEQ ID NO: 782, and a CDR3 region of SEQ ID NO: 783, and b) a heavy-chain variable region comprising a CDR1 region of SEQ ID NO: 784, a CDR2 region of SEQ ID NO: 785, and a CDR3 region of SEQ ID NO: 786;
[0347] 132) a binding molecule comprising a) a light-chain variable region comprising a CDR1 region of SEQ ID NO: 787, a CDR2 region of SEQ ID NO: 788, and a CDR3 region of SEQ ID NO: 789, and b) a heavy-chain variable region comprising a CDR1 region of SEQ ID NO: 790, a CDR2 region of SEQ ID NO: 791, and a CDR3 region of SEQ ID NO: 792;
[0348] 133) a binding molecule comprising a) a light-chain variable region comprising a CDR1 region of SEQ ID NO: 793, a CDR2 region of SEQ ID NO: 794, and a CDR3 region of SEQ ID NO: 795, and b) a heavy-chain variable region comprising a CDR1 region of SEQ ID NO: 796, a CDR2 region of SEQ ID NO: 797, and a CDR3 region of SEQ ID NO: 798;
[0349] 134) a binding molecule comprising a) a light-chain variable region comprising a CDR1 region of SEQ ID NO: 799, a CDR2 region of SEQ ID NO: 800, and a CDR3 region of SEQ ID NO: 801, and b) a heavy-chain variable region comprising a CDR1 region of SEQ ID NO: 802, a CDR2 region of SEQ ID NO: 803, and a CDR3 region of SEQ ID NO: 804;
[0350] 135) a binding molecule comprising a) a light-chain variable region comprising a CDR1 region of SEQ ID NO: 805, a CDR2 region of SEQ ID NO: 806, and a CDR3 region of SEQ ID NO: 807, and b) a heavy-chain variable region comprising a CDR1 region of SEQ ID NO: 808, a CDR2 region of SEQ ID NO: 809, and a CDR3 region of SEQ ID NO: 810;
[0351] 136) a binding molecule comprising a) a light-chain variable region comprising a CDR1 region of SEQ ID NO: 811, a CDR2 region of SEQ ID NO: 812, and a CDR3 region of SEQ ID NO: 813, and b) a heavy-chain variable region comprising a CDR1 region of SEQ ID NO: 814, a CDR2 region of SEQ ID NO: 815, and a CDR3 region of SEQ ID NO: 816;
[0352] 137) a binding molecule comprising a) a light-chain variable region comprising a CDR1 region of SEQ ID NO: 817, a CDR2 region of SEQ ID NO: 818, and a CDR3 region of SEQ ID NO: 819, and b) a heavy-chain variable region comprising a CDR1 region of SEQ ID NO: 820, a CDR2 region of SEQ ID NO: 821, and a CDR3 region of SEQ ID NO: 822;
[0353] 138) a binding molecule comprising a) a light-chain variable region comprising a CDR1 region of SEQ ID NO: 823, a CDR2 region of SEQ ID NO: 824, and a CDR3 region of SEQ ID NO: 825, and b) a heavy-chain variable region comprising a CDR1 region of SEQ ID NO: 826, a CDR2 region of SEQ ID NO: 827, and a CDR3 region of SEQ ID NO: 828;
[0354] 139) a binding molecule comprising a) a light-chain variable region comprising a CDR1 region of SEQ ID NO: 829, a CDR2 region of SEQ ID NO: 830, and a CDR3 region of SEQ ID NO: 831, and b) a heavy-chain variable region comprising a CDR1 region of SEQ ID NO: 832, a CDR2 region of SEQ ID NO: 833, and a CDR3 region of SEQ ID NO: 834;
[0355] 140) a binding molecule comprising a) a light-chain variable region comprising a CDR1 region of SEQ ID NO: 835, a CDR2 region of SEQ ID NO: 836, and a CDR3 region of SEQ ID NO: 837, and b) a heavy-chain variable region comprising a CDR1 region of SEQ ID NO: 838, a CDR2 region of SEQ ID NO: 839, and a CDR3 region of SEQ ID NO: 840;
[0356] 141) a binding molecule comprising a) a light-chain variable region comprising a CDR1 region of SEQ ID NO: 841, a CDR2 region of SEQ ID NO: 842, and a CDR3 region of SEQ ID NO: 843, and b) a heavy-chain variable region comprising a CDR1 region of SEQ ID NO: 844, a CDR2 region of SEQ ID NO: 845, and a CDR3 region of SEQ ID NO: 846;
[0357] 142) a binding molecule comprising a) a light-chain variable region comprising a CDR1 region of SEQ ID NO: 847, a CDR2 region of SEQ ID NO: 848, and a CDR3 region of SEQ ID NO: 849, and b) a heavy-chain variable region comprising a CDR1 region of SEQ ID NO: 850, a CDR2 region of SEQ ID NO: 851, and a CDR3 region of SEQ ID NO: 852;
[0358] 143) a binding molecule comprising a) a light-chain variable region comprising a CDR1 region of SEQ ID NO: 853, a CDR2 region of SEQ ID NO: 854, and a CDR3 region of SEQ ID NO: 855, and b) a heavy-chain variable region comprising a CDR1 region of SEQ ID NO: 856, a CDR2 region of SEQ ID NO: 857, and a CDR3 region of SEQ ID NO: 858;
[0359] 144) a binding molecule comprising a) a light-chain variable region comprising a CDR1 region of SEQ ID NO: 859, a CDR2 region of SEQ ID NO: 860, and a CDR3 region of SEQ ID NO: 861, and b) a heavy-chain variable region comprising a CDR1 region of SEQ ID NO: 862, a CDR2 region of SEQ ID NO: 863, and a CDR3 region of SEQ ID NO: 864;
[0360] 145) a binding molecule comprising a) a light-chain variable region comprising a CDR1 region of SEQ ID NO: 865, a CDR2 region of SEQ ID NO: 866, and a CDR3 region of SEQ ID NO: 867, and b) a heavy-chain variable region comprising a CDR1 region of SEQ ID NO: 868, a CDR2 region of SEQ ID NO: 869, and a CDR3 region of SEQ ID NO: 870;
[0361] 146) a binding molecule comprising a) a light-chain variable region comprising a CDR1 region of SEQ ID NO: 871, a CDR2 region of SEQ ID NO: 872, and a CDR3 region of SEQ ID NO: 873, and b) a heavy-chain variable region comprising a CDR1 region of SEQ ID NO: 874, a CDR2 region of SEQ ID NO: 875, and a CDR3 region of SEQ ID NO: 876;
[0362] 147) a binding molecule comprising a) a light-chain variable region comprising a CDR1 region of SEQ ID NO: 877, a CDR2 region of SEQ ID NO: 878, and a CDR3 region of SEQ ID NO: 879, and b) a heavy-chain variable region comprising a CDR1 region of SEQ ID NO: 880, a CDR2 region of SEQ ID NO: 881, and a CDR3 region of SEQ ID NO: 882;
[0363] 148) a binding molecule comprising a) a light-chain variable region comprising a CDR1 region of SEQ ID NO: 883, a CDR2 region of SEQ ID NO: 884, and a CDR3 region of SEQ ID NO: 885, and b) a heavy-chain variable region comprising a CDR1 region of SEQ ID NO: 886, a CDR2 region of SEQ ID NO: 887, and a CDR3 region of SEQ ID NO: 888;
[0364] 149) a binding molecule comprising a) a light-chain variable region comprising a CDR1 region of SEQ ID NO: 889, a CDR2 region of SEQ ID NO: 890, and a CDR3 region of SEQ ID NO: 891, and b) a heavy-chain variable region comprising a CDR1 region of SEQ ID NO: 892, a CDR2 region of SEQ ID NO: 893, and a CDR3 region of SEQ ID NO: 894;
[0365] 150) a binding molecule comprising a) a light-chain variable region comprising a CDR1 region of SEQ ID NO: 895, a CDR2 region of SEQ ID NO: 896, and a CDR3 region of SEQ ID NO: 897, and b) a heavy-chain variable region comprising a CDR1 region of SEQ ID NO: 898, a CDR2 region of SEQ ID NO: 899, and a CDR3 region of SEQ ID NO: 900;
[0366] 151) a binding molecule comprising a) a light-chain variable region comprising a CDR1 region of SEQ ID NO: 901, a CDR2 region of SEQ ID NO: 902, and a CDR3 region of SEQ ID NO: 903, and b) a heavy-chain variable region comprising a CDR1 region of SEQ ID NO: 904, a CDR2 region of SEQ ID NO: 905, and a CDR3 region of SEQ ID NO: 906;
[0367] 152) a binding molecule comprising a) a light-chain variable region comprising a CDR1 region of SEQ ID NO: 907, a CDR2 region of SEQ ID NO: 908, and a CDR3 region of SEQ ID NO: 909, and b) a heavy-chain variable region comprising a CDR1 region of SEQ ID NO: 910, a CDR2 region of SEQ ID NO: 911, and a CDR3 region of SEQ ID NO: 912;
[0368] 153) a binding molecule comprising a) a light-chain variable region comprising a CDR1 region of SEQ ID NO: 913, a CDR2 region of SEQ ID NO: 914, and a CDR3 region of SEQ ID NO: 915, and b) a heavy-chain variable region comprising a CDR1 region of SEQ ID NO: 916, a CDR2 region of SEQ ID NO: 917, and a CDR3 region of SEQ ID NO: 918;
[0369] 154) a binding molecule comprising a) a light-chain variable region comprising a CDR1 region of SEQ ID NO: 919, a CDR2 region of SEQ ID NO: 920, and a CDR3 region of SEQ ID NO: 921, and b) a heavy-chain variable region comprising a CDR1 region of SEQ ID NO: 922, a CDR2 region of SEQ ID NO: 923, and a CDR3 region of SEQ ID NO: 924;
[0370] 155) a binding molecule comprising a) a light-chain variable region comprising a CDR1 region of SEQ ID NO: 925, a CDR2 region of SEQ ID NO: 926, and a CDR3 region of SEQ ID NO: 927, and b) a heavy-chain variable region comprising a CDR1 region of SEQ ID NO: 928, a CDR2 region of SEQ ID NO: 929, and a CDR3 region of SEQ ID NO: 930;
[0371] 156) a binding molecule comprising a) a light-chain variable region comprising a CDR1 region of SEQ ID NO: 931, a CDR2 region of SEQ ID NO: 932, and a CDR3 region of SEQ ID NO: 933, and b) a heavy-chain variable region comprising a CDR1 region of SEQ ID NO: 934, a CDR2 region of SEQ ID NO: 935, and a CDR3 region of SEQ ID NO: 936;
[0372] 157) a binding molecule comprising a) a light-chain variable region comprising a CDR1 region of SEQ ID NO: 937, a CDR2 region of SEQ ID NO: 938, and a CDR3 region of SEQ ID NO: 939, and b) a heavy-chain variable region comprising a CDR1 region of SEQ ID NO: 940, a CDR2 region of SEQ ID NO: 941, and a CDR3 region of SEQ ID NO: 942;
[0373] 158) a binding molecule comprising a) a light-chain variable region comprising a CDR1 region of SEQ ID NO: 943, a CDR2 region of SEQ ID NO: 944, and a CDR3 region of SEQ ID NO: 945, and b) a heavy-chain variable region comprising a CDR1 region of SEQ ID NO: 946, a CDR2 region of SEQ ID NO: 947, and a CDR3 region of SEQ ID NO: 948;
[0374] 159) a binding molecule comprising a) a light-chain variable region comprising a CDR1 region of SEQ ID NO: 949, a CDR2 region of SEQ ID NO: 950, and a CDR3 region of SEQ ID NO: 951, and b) a heavy-chain variable region comprising a CDR1 region of SEQ ID NO: 952, a CDR2 region of SEQ ID NO: 953, and a CDR3 region of SEQ ID NO: 954;
[0375] 160) a binding molecule comprising a) a light-chain variable region comprising a CDR1 region of SEQ ID NO: 955, a CDR2 region of SEQ ID NO: 956, and a CDR3 region of SEQ ID NO: 957, and b) a heavy-chain variable region comprising a CDR1 region of SEQ ID NO: 958, a CDR2 region of SEQ ID NO: 959, and a CDR3 region of SEQ ID NO: 960;
[0376] 161) a binding molecule comprising a) a light-chain variable region comprising a CDR1 region of SEQ ID NO: 961, a CDR2 region of SEQ ID NO: 962, and a CDR3 region of SEQ ID NO: 963, and b) a heavy-chain variable region comprising a CDR1 region of SEQ ID NO: 964, a CDR2 region of SEQ ID NO: 965, and a CDR3 region of SEQ ID NO: 966;
[0377] 162) a binding molecule comprising a) a light-chain variable region comprising a CDR1 region of SEQ ID NO: 967, a CDR2 region of SEQ ID NO: 968, and a CDR3 region of SEQ ID NO: 969, and b) a heavy-chain variable region comprising a CDR1 region of SEQ ID NO: 970, a CDR2 region of SEQ ID NO: 971, and a CDR3 region of SEQ ID NO: 972;
[0378] 163) a binding molecule comprising a) a light-chain variable region comprising a CDR1 region of SEQ ID NO: 973, a CDR2 region of SEQ ID NO: 974, and a CDR3 region of SEQ ID NO: 975, and b) a heavy-chain variable region comprising a CDR1 region of SEQ ID NO: 976, a CDR2 region of SEQ ID NO: 977, and a CDR3 region of SEQ ID NO: 978;
[0379] 164) a binding molecule comprising a) a light-chain variable region comprising a CDR1 region of SEQ ID NO: 979, a CDR2 region of SEQ ID NO: 980, and a CDR3 region of SEQ ID NO: 981, and b) a heavy-chain variable region comprising a CDR1 region of SEQ ID NO: 982, a CDR2 region of SEQ ID NO: 983, and a CDR3 region of SEQ ID NO: 984;
[0380] 165) a binding molecule comprising a) a light-chain variable region comprising a CDR1 region of SEQ ID NO: 985, a CDR2 region of SEQ ID NO: 986, and a CDR3 region of SEQ ID NO: 987, and b) a heavy-chain variable region comprising a CDR1 region of SEQ ID NO: 988, a CDR2 region of SEQ ID NO: 989, and a CDR3 region of SEQ ID NO: 990;
[0381] 166) a binding molecule comprising a) a light-chain variable region comprising a CDR1 region of SEQ ID NO: 991, a CDR2 region of SEQ ID NO: 992, and a CDR3 region of SEQ ID NO: 993, and b) a heavy-chain variable region comprising a CDR1 region of SEQ ID NO: 994, a CDR2 region of SEQ ID NO: 995, and a CDR3 region of SEQ ID NO: 996;
[0382] 167) a binding molecule comprising a) a light-chain variable region comprising a CDR1 region of SEQ ID NO: 997, a CDR2 region of SEQ ID NO: 998, and a CDR3 region of SEQ ID NO: 999, and b) a heavy-chain variable region comprising a CDR1 region of SEQ ID NO: 1,000, a CDR2 region of SEQ ID NO: 1,001, and a CDR3 region of SEQ ID NO: 1,002;
[0383] 168) a binding molecule comprising a) a light-chain variable region comprising a CDR1 region of SEQ ID NO: 1,003, a CDR2 region of SEQ ID NO: 1,004, and a CDR3 region of SEQ ID NO: 1,005, and b) a heavy-chain variable region comprising a CDR1 region of SEQ ID NO: 1,006, a CDR2 region of SEQ ID NO: 1,007, and a CDR3 region of SEQ ID NO: 1,008;
[0384] 169) a binding molecule comprising a) a light-chain variable region comprising a CDR1 region of SEQ ID NO: 1,009, a CDR2 region of SEQ ID NO: 1,010, and a CDR3 region of SEQ ID NO: 1,011, and b) a heavy-chain variable region comprising a CDR1 region of SEQ ID NO: 1,012, a CDR2 region of SEQ ID NO: 1,013, and a CDR3 region of SEQ ID NO: 1,014;
[0385] 170) a binding molecule comprising a) a light-chain variable region comprising a CDR1 region of SEQ ID NO: 1,015, a CDR2 region of SEQ ID NO: 1,016, and a CDR3 region of SEQ ID NO: 1,017, and b) a heavy-chain variable region comprising a CDR1 region of SEQ ID NO: 1,018, a CDR2 region of SEQ ID NO: 1,019, and a CDR3 region of SEQ ID NO: 1,020;
[0386] 171) a binding molecule comprising a) a light-chain variable region comprising a CDR1 region of SEQ ID NO: 1,021, a CDR2 region of SEQ ID NO: 1,022, and a CDR3 region of SEQ ID NO: 1,023, and b) a heavy-chain variable region comprising a CDR1 region of SEQ ID NO: 1,024, a CDR2 region of SEQ ID NO: 1,025, and a CDR3 region of SEQ ID NO: 1,026;
[0387] 172) a binding molecule comprising a) a light-chain variable region comprising a CDR1 region of SEQ ID NO: 1,027, a CDR2 region of SEQ ID NO: 1,028, and a CDR3 region of SEQ ID NO: 1,029, and b) a heavy-chain variable region comprising a CDR1 region of SEQ ID NO: 1,030, a CDR2 region of SEQ ID NO: 1,031, and a CDR3 region of SEQ ID NO: 1,032;
[0388] 173) a binding molecule comprising a) a light-chain variable region comprising a CDR1 region of SEQ ID NO: 1,033, a CDR2 region of SEQ ID NO: 1,034, and a CDR3 region of SEQ ID NO: 1,035, and b) a heavy-chain variable region comprising a CDR1 region of SEQ ID NO: 1,036, a CDR2 region of SEQ ID NO: 1,037, and a CDR3 region of SEQ ID NO: 1,038;
[0389] 174) a binding molecule comprising a) a light-chain variable region comprising a CDR1 region of SEQ ID NO: 1,039, a CDR2 region of SEQ ID NO: 1,040, and a CDR3 region of SEQ ID NO: 1,041, and b) a heavy-chain variable region comprising a CDR1 region of SEQ ID NO: 1,042, a CDR2 region of SEQ ID NO: 1,043, and a CDR3 region of SEQ ID NO: 1,044;
[0390] 175) a binding molecule comprising a) a light-chain variable region comprising a CDR1 region of SEQ ID NO: 1,045, a CDR2 region of SEQ ID NO: 1,046, and a CDR3 region of SEQ ID NO: 1,047, and b) a heavy-chain variable region comprising a CDR1 region of SEQ ID NO: 1,048, a CDR2 region of SEQ ID NO: 1,049, and a CDR3 region of SEQ ID NO: 1,050;
[0391] 176) a binding molecule comprising a) a light-chain variable region comprising a CDR1 region of SEQ ID NO: 1,051, a CDR2 region of SEQ ID NO: 1,052, and a CDR3 region of SEQ ID NO: 1,053, and b) a heavy-chain variable region comprising a CDR1 region of SEQ ID NO: 1,054, a CDR2 region of SEQ ID NO: 1,055, and a CDR3 region of SEQ ID NO: 1,056;
[0392] 177) a binding molecule comprising a) a light-chain variable region comprising a CDR1 region of SEQ ID NO: 1,057, a CDR2 region of SEQ ID NO: 1,058, and a CDR3 region of SEQ ID NO: 1,059, and b) a heavy-chain variable region comprising a CDR1 region of SEQ ID NO: 1,060, a CDR2 region of SEQ ID NO: 1,061, and a CDR3 region of SEQ ID NO: 1,062;
[0393] 178) a binding molecule comprising a) a light-chain variable region comprising a CDR1 region of SEQ ID NO: 1,063, a CDR2 region of SEQ ID NO: 1,064, and a CDR3 region of SEQ ID NO: 1,065, and b) a heavy-chain variable region comprising a CDR1 region of SEQ ID NO: 1,066, a CDR2 region of SEQ ID NO: 1,067, and a CDR3 region of SEQ ID NO: 1,068;
[0394] 179) a binding molecule comprising a) a light-chain variable region comprising a CDR1 region of SEQ ID NO: 1,069, a CDR2 region of SEQ ID NO: 1,070, and a CDR3 region of SEQ ID NO: 1,071, and b) a heavy-chain variable region comprising a CDR1 region of SEQ ID NO: 1,072, a CDR2 region of SEQ ID NO: 1,073, and a CDR3 region of SEQ ID NO: 1,074;
[0395] 180) a binding molecule comprising a) a light-chain variable region comprising a CDR1 region of SEQ ID NO: 1,075, a CDR2 region of SEQ ID NO: 1,076, and a CDR3 region of SEQ ID NO: 1,077, and b) a heavy-chain variable region comprising a CDR1 region of SEQ ID NO: 1,078, a CDR2 region of SEQ ID NO: 1,079, and a CDR3 region of SEQ ID NO: 1,080;
[0396] 181) a binding molecule comprising a) a light-chain variable region comprising a CDR1 region of SEQ ID NO: 1,081, a CDR2 region of SEQ ID NO: 1,082, and a CDR3 region of SEQ ID NO: 1,083, and b) a heavy-chain variable region comprising a CDR1 region of SEQ ID NO: 1,084, a CDR2 region of SEQ ID NO: 1,085, and a CDR3 region of SEQ ID NO: 1,086;
[0397] 182) a binding molecule comprising a) a light-chain variable region comprising a CDR1 region of SEQ ID NO: 1,087, a CDR2 region of SEQ ID NO: 1,088, and a CDR3 region of SEQ ID NO: 1,089, and b) a heavy-chain variable region comprising a CDR1 region of SEQ ID NO: 1,090, a CDR2 region of SEQ ID NO: 1,091, and a CDR3 region of SEQ ID NO: 1,092;
[0398] 183) a binding molecule comprising a) a light-chain variable region comprising a CDR1 region of SEQ ID NO: 1,093, a CDR2 region of SEQ ID NO: 1,094, and a CDR3 region of SEQ ID NO: 1,095, and b) a heavy-chain variable region comprising a CDR1 region of SEQ ID NO: 1,096, a CDR2 region of SEQ ID NO: 1,097, and a CDR3 region of SEQ ID NO: 1,098;
[0399] 184) a binding molecule comprising a) a light-chain variable region comprising a CDR1 region of SEQ ID NO: 1,099, a CDR2 region of SEQ ID NO: 1,100, and a CDR3 region of SEQ ID NO: 1,101, and b) a heavy-chain variable region comprising a CDR1 region of SEQ ID NO: 1,102, a CDR2 region of SEQ ID NO: 1,103, and a CDR3 region of SEQ ID NO: 1,104;
[0400] 185) a binding molecule comprising a) a light-chain variable region comprising a CDR1 region of SEQ ID NO: 1,105, a CDR2 region of SEQ ID NO: 1,106, and a CDR3 region of SEQ ID NO: 1,107, and b) a heavy-chain variable region comprising a CDR1 region of SEQ ID NO: 1,108, a CDR2 region of SEQ ID NO: 1,109, and a CDR3 region of SEQ ID NO: 1,110;
[0401] 186) a binding molecule comprising a) a light-chain variable region comprising a CDR1 region of SEQ ID NO: 1,111, a CDR2 region of SEQ ID NO: 1,112, and a CDR3 region of SEQ ID NO: 1,113, and b) a heavy-chain variable region comprising a CDR1 region of SEQ ID NO: 1,114, a CDR2 region of SEQ ID NO: 1,115, and a CDR3 region of SEQ ID NO: 1,116;
[0402] 187) a binding molecule comprising a) a light-chain variable region comprising a CDR1 region of SEQ ID NO: 1,117, a CDR2 region of SEQ ID NO: 1,118, and a CDR3 region of SEQ ID NO: 1,119, and b) a heavy-chain variable region comprising a CDR1 region of SEQ ID NO: 1,120, a CDR2 region of SEQ ID NO: 1,121, and a CDR3 region of SEQ ID NO: 1,122;
[0403] 188) a binding molecule comprising a) a light-chain variable region comprising a CDR1 region of SEQ ID NO: 1,123, a CDR2 region of SEQ ID NO: 1,124, and a CDR3 region of SEQ ID NO: 1,125, and b) a heavy-chain variable region comprising a CDR1 region of SEQ ID NO: 1,126, a CDR2 region of SEQ ID NO: 1,127, and a CDR3 region of SEQ ID NO: 1,128;
[0404] 189) a binding molecule comprising a) a light-chain variable region comprising a CDR1 region of SEQ ID NO: 1,129, a CDR2 region of SEQ ID NO: 1,130, and a CDR3 region of SEQ ID NO: 1,131, and b) a heavy-chain variable region comprising a CDR1 region of SEQ ID NO: 1,132, a CDR2 region of SEQ ID NO: 1,133, and a CDR3 region of SEQ ID NO: 1,134; and
[0405] 190) a binding molecule comprising a) a light-chain variable region comprising a CDR1 region of SEQ ID NO: 1,135, a CDR2 region of SEQ ID NO: 1,136, and a CDR3 region of SEQ ID NO: 1,137, and b) a heavy-chain variable region comprising a CDR1 region of SEQ ID NO: 1,138, a CDR2 region of SEQ ID NO: 1,139, and a CDR3 region of SEQ ID NO: 1,140.

[0406] In one embodiment of the present invention, the binding molecule is a binding molecule that binds to a spike protein (S protein) on the surface of SARS-coronavirus-2 (SARS-CoV-2), and comprises a binding molecule that competes with any one binding molecule selected from the group consisting of the following binding molecules 1) to 49), and this binding molecule is included within the scope of the present invention as long as it achieves the purposes and effects of the present invention:
[0407] 1) a binding molecule comprising a) a light-chain variable region comprising a CDR1 region of SEQ ID NO: 7, a CDR2 region of SEQ ID NO: 8, and a CDR3 region of SEQ ID NO: 9, and b) a heavy-chain variable region comprising a CDR1 region of SEQ ID NO: 10, a CDR2 region of SEQ ID NO: 11, and a CDR3 region of SEQ ID NO: 12;
[0408] 2) a binding molecule comprising a) a light-chain variable region comprising a CDR1 region of SEQ ID NO: 13, a CDR2 region of SEQ ID NO: 14, and a CDR3 region of SEQ ID NO: 15, and b) a heavy-chain variable region comprising a CDR1 region of SEQ ID NO: 16, a CDR2 region of SEQ ID NO: 17, and a CDR3 region of SEQ ID NO: 18;
[0409] 3) a binding molecule comprising a) a light-chain variable region comprising a CDR1 region of SEQ ID NO: 67, a CDR2 region of SEQ ID NO: 68, and a CDR3 region of SEQ ID NO: 69, and b) a heavy-chain variable region comprising a CDR1 region of SEQ ID NO: 70, a CDR2 region of SEQ ID NO: 71, and a CDR3 region of SEQ ID NO: 72;
[0410] 4) a binding molecule comprising a) a light-chain variable region comprising a CDR1 region of SEQ ID NO: 85, a CDR2 region of SEQ ID NO: 86, and a CDR3 region of SEQ ID NO: 87, and b) a heavy-chain variable region comprising a CDR1 region of SEQ ID NO: 88, a CDR2 region of SEQ ID NO: 89, and a CDR3 region of SEQ ID NO: 90;
[0411] 5) a binding molecule comprising a) a light-chain variable region comprising a CDR1 region of SEQ ID NO: 91, a CDR2 region of SEQ ID NO: 92, and a CDR3 region of SEQ ID NO: 93, and b) a heavy-chain variable region comprising a CDR1 region of SEQ ID NO: 94, a CDR2 region of SEQ ID NO: 95, and a CDR3 region of SEQ ID NO: 96;
[0412] 6) a binding molecule comprising a) a light-chain variable region comprising a CDR1 region of SEQ ID NO: 103, a CDR2 region of SEQ ID NO: 104, and a CDR3 region of SEQ ID NO: 105, and b) a heavy-chain variable region comprising a CDR1 region of SEQ ID NO: 106, a CDR2 region of SEQ ID NO: 107, and a CDR3 region of SEQ ID NO: 108;
[0413] 7) a binding molecule comprising a) a light-chain variable region comprising a CDR1 region of SEQ ID NO: 109, CDR2 region of SEQ ID NO: 110, and CDR3 region of SEQ ID NO: 111, and b) a heavy-chain variable region comprising a CDR1 region of SEQ ID NO: 112, a CDR2 region of SEQ ID NO: 113, and a CDR3 region of SEQ ID NO: 114;
[0414] 8) a binding molecule comprising a) a light-chain variable region comprising a CDR1 region of SEQ ID NO: 115, a CDR2 region of SEQ ID NO: 116, and a CDR3 region of SEQ ID NO: 117, and b) a heavy-chain variable region comprising a CDR1 region of SEQ ID NO: 118, a CDR2 region of SEQ ID NO: 119, and a CDR3 region of SEQ ID NO: 120;
[0415] 9) a binding molecule comprising a) a light-chain variable region comprising a CDR1 region of SEQ ID NO: 127, a CDR2 region of SEQ ID NO: 128, and a CDR3 region of SEQ ID NO: 129, and b) a heavy-chain variable region comprising a CDR1 region of SEQ ID NO: 130, a CDR2 region of SEQ ID NO: 131, and a CDR3 region of SEQ ID NO: 132;
[0416] 10) a binding molecule comprising a) a light-chain variable region comprising a CDR1 region of SEQ ID NO: 133, a CDR2 region of SEQ ID NO: 134, and a CDR3 region of SEQ ID NO: 135, and b) a heavy-chain variable region comprising a CDR1 region of SEQ ID NO: 136, a CDR2 region of SEQ ID NO: 137, and a CDR3 region of SEQ ID NO: 138;
[0417] 11) a binding molecule comprising a) a light-chain variable region comprising a CDR1 region of SEQ ID NO: 139, a CDR2 region of SEQ ID NO: 140, and a CDR3 region of SEQ ID NO: 141, and b) a heavy-chain variable region comprising a CDR1 region of SEQ ID NO: 142, a CDR2 region of SEQ ID NO: 143, and a CDR3 region of SEQ ID NO: 144;
[0418] 12) a binding molecule comprising a) a light-chain variable region comprising a CDR1 region of SEQ ID NO: 151, a CDR2 region of SEQ ID NO: 152, and a CDR3 region of SEQ ID NO: 153, and b) a heavy-chain variable region comprising a CDR1 region of SEQ ID NO: 154, a CDR2 region of SEQ ID NO: 155, and a CDR3 region of SEQ ID NO: 156;
[0419] 13) a binding molecule comprising a) a light-chain variable region comprising a CDR1 region of SEQ ID NO: 181, a CDR2 region of SEQ ID NO: 182, and a CDR3 region of SEQ ID NO: 183, and b) a heavy-chain variable region comprising a CDR1 region of SEQ ID NO: 184, a CDR2 region of SEQ ID NO: 185, and a CDR3 region of SEQ ID NO: 186;
[0420] 14) a binding molecule comprising a) a light-chain variable region comprising a CDR1 region of SEQ ID NO: 187, a CDR2 region of SEQ ID NO: 188, and a CDR3 region of SEQ ID NO: 189, and b) a heavy-chain variable region comprising a CDR1 region of SEQ ID NO: 190, a CDR2 region of SEQ ID NO: 191, and a CDR3 region of SEQ ID NO: 192;
[0421] 15) a binding molecule comprising a) a light-chain variable region comprising a CDR1 region of SEQ ID NO: 193, a CDR2 region of SEQ ID NO: 194, and a CDR3 region of SEQ ID NO: 195, and b) a heavy-chain variable region comprising a CDR1 region of SEQ ID NO: 196, a CDR2 region of SEQ ID NO: 197, and a CDR3 region of SEQ ID NO: 198;
[0422] 16) a binding molecule comprising a) a light-chain variable region comprising a CDR1 region of SEQ ID NO: 199, a CDR2 region of SEQ ID NO: 200, and a CDR3 region of SEQ ID NO: 201, and b) a heavy-chain variable region comprising a CDR1 region of SEQ ID NO: 202, a CDR2 region of SEQ ID NO: 203, and a CDR3 region of SEQ ID NO: 204;
[0423] 17) a binding molecule comprising a) a light-chain variable region comprising a CDR1 region of SEQ ID NO: 217, a CDR2 region of SEQ ID NO: 218, and a CDR3 region of SEQ ID NO: 219, and b) a heavy-chain variable region comprising a CDR1 region of SEQ ID NO: 220, a CDR2 region of SEQ ID NO: 221, and a CDR3 region of SEQ ID NO: 222;
[0424] 18) a binding molecule comprising a) a light-chain variable region comprising a CDR1 region of SEQ ID NO: 253, a CDR2 region of SEQ ID NO: 254, and a CDR3 region of SEQ ID NO: 255, and b) a heavy-chain variable region comprising a CDR1 region of SEQ ID NO: 256, a CDR2 region of SEQ ID NO: 257, and a CDR3 region of SEQ ID NO: 258;
[0425] 19) a binding molecule comprising a) a light-chain variable region comprising a CDR1 region of SEQ ID NO: 265, a CDR2 region of SEQ ID NO: 266, and a CDR3 region of SEQ ID NO: 267, and b) a heavy-chain variable region comprising a CDR1 region of SEQ ID NO: 268, a CDR2 region of SEQ ID NO: 269, and a CDR3 region of SEQ ID NO: 270;
[0426] 20) a binding molecule comprising a) a light-chain variable region comprising a CDR1 region of SEQ ID NO: 283, a CDR2 region of SEQ ID NO: 284, and a CDR3 region of SEQ ID NO: 285, and b) a heavy-chain variable region comprising a CDR1 region of SEQ ID NO: 286, a CDR2 region of SEQ ID NO: 287, and a CDR3 region of SEQ ID NO: 288;
[0427] 21) a binding molecule comprising a) a light-chain variable region comprising a CDR1 region of SEQ ID NO: 295, a CDR2 region of SEQ ID NO: 296, and a CDR3 region of SEQ ID NO: 297, and b) a heavy-chain variable region comprising a CDR1 region of SEQ ID NO: 298, a CDR2 region of SEQ ID NO: 299, and a CDR3 region of SEQ ID NO: 300;
[0428] 22) a binding molecule comprising a) a light-chain variable region comprising a CDR1 region of SEQ ID NO: 301, a CDR2 region of SEQ ID NO: 302, and a CDR3 region of SEQ ID NO: 303, and b) a heavy-chain variable region comprising a CDR1 region of SEQ ID NO: 304, a CDR2 region of SEQ ID NO: 305, and a CDR3 region of SEQ ID NO: 306;
[0429] 23) a binding molecule comprising a) a light-chain variable region comprising a CDR1 region of SEQ ID NO: 313, a CDR2 region of SEQ ID NO: 314, and a CDR3 region of SEQ ID NO: 315, and b) a heavy-chain variable region comprising a CDR1 region of SEQ ID NO: 316, a CDR2 region of SEQ ID NO: 317, and a CDR3 region of SEQ ID NO: 318;
[0430] 24) a binding molecule comprising a) a light-chain variable region comprising a CDR1 region of SEQ ID NO: 319, a CDR2 region of SEQ ID NO: 320, and a CDR3 region of SEQ ID NO: 321, and b) a heavy-chain variable region comprising a CDR1 region of SEQ ID NO: 322, a CDR2 region of SEQ ID NO: 323, and a CDR3 region of SEQ ID NO: 324;
[0431] 25) a binding molecule comprising a) a light-chain variable region comprising a CDR1 region of SEQ ID NO: 325, a CDR2 region of SEQ ID NO: 326, and a CDR3 region of SEQ ID NO: 327, and b) a heavy-chain variable region comprising a CDR1 region of SEQ ID NO: 328, a CDR2 region of SEQ ID NO: 329, and a CDR3 region of SEQ ID NO: 330;
[0432] 26) a binding molecule comprising a) a light-chain variable region comprising a CDR1 region of SEQ ID NO: 331, a CDR2 region of SEQ ID NO: 332, and a CDR3 region of SEQ ID NO: 333, and b) a heavy-chain variable region comprising a CDR1 region of SEQ ID NO: 334, a CDR2 region of SEQ ID NO: 335, and a CDR3 region of SEQ ID NO: 336;
[0433] 27) a binding molecule comprising a) a light-chain variable region comprising a CDR1 region of SEQ ID NO: 349, a CDR2 region of SEQ ID NO: 350, and a CDR3 region of SEQ ID NO: 351, and b) a heavy-chain variable region comprising a CDR1 region of SEQ ID NO: 352, a CDR2 region of SEQ ID NO: 353, and a CDR3 region of SEQ ID NO: 354;
[0434] 28) a binding molecule comprising a) a light-chain variable region comprising a CDR1 region of SEQ ID NO: 355, a CDR2 region of SEQ ID NO: 356, and a CDR3 region of SEQ ID NO: 357, and b) a heavy-chain variable region comprising a CDR1 region of SEQ ID NO: 358, a CDR2 region of SEQ ID NO: 359, and a CDR3 region of SEQ ID NO: 360;
[0435] 29) a binding molecule comprising a) a light-chain variable region comprising a CDR1 region of SEQ ID NO: 361, a CDR2 region of SEQ ID NO: 362, and a CDR3 region of SEQ ID NO: 363, and b) a heavy-chain variable region comprising a CDR1 region of SEQ ID NO: 364, a CDR2 region of SEQ ID NO: 365, and a CDR3 region of SEQ ID NO: 366;
[0436] 30) a binding molecule comprising a) a light-chain variable region comprising a CDR1 region of SEQ ID NO: 391, a CDR2 region of SEQ ID NO: 392, and a CDR3 region of SEQ ID NO: 393, and b) a heavy-chain variable region comprising a CDR1 region of SEQ ID NO: 394, a CDR2 region of SEQ ID NO: 395, and a CDR3 region of SEQ ID NO: 396;
[0437] 31) a binding molecule comprising a) a light-chain variable region comprising a CDR1 region of SEQ ID NO: 409, a CDR2 region of SEQ ID NO: 410, and a CDR3 region of SEQ ID NO: 411, and b) a heavy-chain variable region comprising a CDR1 region of SEQ ID NO: 412, a CDR2 region of SEQ ID NO: 413, and a CDR3 region of SEQ ID NO: 414;
[0438] 32) a binding molecule comprising a) a light-chain variable region comprising a CDR1 region of SEQ ID NO: 439, a CDR2 region of SEQ ID NO: 440, and a CDR3 region of SEQ ID NO: 441, and b) a heavy-chain variable region comprising a CDR1 region of SEQ ID NO: 442, a CDR2 region of SEQ ID NO: 443, and a CDR3 region of SEQ ID NO: 444;
[0439] 33) a binding molecule comprising a) a light-chain variable region comprising a CDR1 region of SEQ ID NO: 445, a CDR2 region of SEQ ID NO: 446, and a CDR3 region of SEQ ID NO: 447, and b) a heavy-chain variable region comprising a CDR1 region of SEQ ID NO: 448, a CDR2 region of SEQ ID NO: 449, and a CDR3 region of SEQ ID NO: 450;
[0440] 34) a binding molecule comprising a) a light-chain variable region comprising a CDR1 region of SEQ ID NO: 451, a CDR2 region of SEQ ID NO: 452, and a CDR3 region of SEQ ID NO: 453, and b) a heavy-chain variable region comprising a CDR1 region of SEQ ID NO: 454, a CDR2 region of SEQ ID NO: 455, and a CDR3 region of SEQ ID NO: 456;
[0441] 35) a binding molecule comprising a) a light-chain variable region comprising a CDR1 region of SEQ ID NO: 481, a CDR2 region of SEQ ID NO: 482, and a CDR3 region of SEQ ID NO: 483, and b) a heavy-chain variable region comprising a CDR1 region of SEQ ID NO: 484, a CDR2 region of SEQ ID NO: 485, and a CDR3 region of SEQ ID NO: 486;
[0442] 36) a binding molecule comprising a) a light-chain variable region comprising a CDR1 region of SEQ ID NO: 487, a CDR2 region of SEQ ID NO: 488, and a CDR3 region of SEQ ID NO: 489, and b) a heavy-chain variable region comprising a CDR1 region of SEQ ID NO: 490, a CDR2 region of SEQ ID NO: 491, and a CDR3 region of SEQ ID NO: 492;
[0443] 37) a binding molecule comprising a) a light-chain variable region comprising a CDR1 region of SEQ ID NO: 493, a CDR2 region of SEQ ID NO: 494, and a CDR3 region of SEQ ID NO: 495, and b) a heavy-chain variable region comprising a CDR1 region of SEQ ID NO: 496, a CDR2 region of SEQ ID NO: 497, and a CDR3 region of SEQ ID NO: 498;
[0444] 38) a binding molecule comprising a) a light-chain variable region comprising a CDR1 region of SEQ ID NO: 505, a CDR2 region of SEQ ID NO: 506, and a CDR3 region of SEQ ID NO: 507, and b) a heavy-chain variable region comprising a CDR1 region of SEQ ID NO: 508, a CDR2 region of SEQ ID NO: 509, and a CDR3 region of SEQ ID NO: 510;
[0445] 39) a binding molecule comprising a) a light-chain variable region comprising a CDR1 region of SEQ ID NO: 511, a CDR2 region of SEQ ID NO: 512, and a CDR3 region of SEQ ID NO: 513, and b) a heavy-chain variable region comprising a CDR1 region of SEQ ID NO: 514, a CDR2 region of SEQ ID NO: 515, and a CDR3 region of SEQ ID NO: 516;
[0446] 40) a binding molecule comprising a) a light-chain variable region comprising a CDR1 region of SEQ ID NO: 517, a CDR2 region of SEQ ID NO: 518, and a CDR3 region of SEQ ID NO: 519, and b) a heavy-chain variable region comprising a CDR1 region of SEQ ID NO: 520, a CDR2 region of SEQ ID NO: 521, and a CDR3 region of SEQ ID NO: 522;
[0447] 41) a binding molecule comprising a) a light-chain variable region comprising a CDR1 region of SEQ ID NO: 553, a CDR2 region of SEQ ID NO: 554, and a CDR3 region of SEQ ID NO: 555, and b) a heavy-chain variable region comprising a CDR1 region of SEQ ID NO: 556, a CDR2 region of SEQ ID NO: 557, and a CDR3 region of SEQ ID NO: 558;
[0448] 42) a binding molecule comprising a) a light-chain variable region comprising a CDR1 region of SEQ ID NO: 559, a CDR2 region of SEQ ID NO: 560, and a CDR3 region of SEQ ID NO: 561, and b) a heavy-chain variable region comprising a CDR1 region of SEQ ID NO: 562, a CDR2 region of SEQ ID NO: 563, and a CDR3 region of SEQ ID NO: 564;
[0449] 43) a binding molecule comprising a) a light-chain variable region comprising a CDR1 region of SEQ ID NO: 565, a CDR2 region of SEQ ID NO: 566, and a CDR3 region of SEQ ID NO: 567, and b) a heavy-chain variable region comprising a CDR1 region of SEQ ID NO: 568, a CDR2 region of SEQ ID NO: 569, and a CDR3 region of SEQ ID NO: 570;
[0450] 44) a binding molecule comprising a) a light-chain variable region comprising a CDR1 region of SEQ ID NO: 571, a CDR2 region of SEQ ID NO: 572, and a CDR3 region of SEQ ID NO: 573, and b) a heavy-chain variable region comprising a CDR1 region of SEQ ID NO: 574, a CDR2 region of SEQ ID NO: 575, and a CDR3 region of SEQ ID NO: 576;
[0451] 45) a binding molecule comprising a) a light-chain variable region comprising a CDR1 region of SEQ ID NO: 583, a CDR2 region of SEQ ID NO: 584, and a CDR3 region of SEQ ID NO: 585, and b) a heavy-chain variable region comprising a CDR1 region of SEQ ID NO: 586, a CDR2 region of SEQ ID NO: 587, and a CDR3 region of SEQ ID NO: 588;
[0452] 46) a binding molecule comprising a) a light-chain variable region comprising a CDR1 region of SEQ ID NO: 607, a CDR2 region of SEQ ID NO: 608, and a CDR3 region of SEQ ID NO: 609, and b) a heavy-chain variable region comprising a CDR1 region of SEQ ID NO: 610, a CDR2 region of SEQ ID NO: 611, and a CDR3 region of SEQ ID NO: 612;
[0453] 47) a binding molecule comprising a) a light-chain variable region comprising a CDR1 region of SEQ ID NO: 613, a CDR2 region of SEQ ID NO: 614, and a CDR3 region of SEQ ID NO: 615, and b) a heavy-chain variable region comprising a CDR1 region of SEQ ID NO: 616, a CDR2 region of SEQ ID NO: 617, and a CDR3 region of SEQ ID NO: 618;
[0454] 48) a binding molecule comprising a) a light-chain variable region comprising a CDR1 region of SEQ ID NO: 619, a CDR2 region of SEQ ID NO: 620, and a CDR3 region of SEQ ID NO: 621, and b) a heavy-chain variable region comprising a CDR1 region of SEQ ID NO: 622, a CDR2 region of SEQ ID NO: 623, and a CDR3 region of SEQ ID NO: 624; and
[0455] 49) a binding molecule comprising a) a light-chain variable region comprising a CDR1 region of SEQ ID NO: 643, a CDR2 region of SEQ ID NO: 644, and a CDR3 region of SEQ ID NO: 645, and b) a heavy-chain variable region comprising a CDR1 region of SEQ ID NO: 646, a CDR2 region of SEQ ID NO: 647, and a CDR3 region of SEQ ID NO: 648.

[0456] In one embodiment of the present invention, the binding molecule may be a binding molecule comprising a light-chain variable region comprising the following LC CDR1, LC CDR2 and LC CDR3, and a heavy-chain variable region comprising the following HC CDR1, HC CDR2 and HC CDR3.

[0457] The LC CDR1 is:
[0458] the sequence SGSX₁SNIGX₂NTVN, where X₁ is S or T, and X₂ is S or T; or
[0459] the sequence X₁₃GSX₁₄SX₁₅IX₁₆X₁₇X₁₈X₁₉VS, where X₁₃ is S or T, X₁₄ is S or N, X₁₅ is N or S, X₁₆ is G or E, X₁₇ is N or S, X₁₈ is N or S, and X₁₉ is Y or F; or
[0460] the sequence RASQSVX₃₂X₃₃X₃₄X₃₅A, where X₃₂ is S, N or R, X₃₃ is S or N, X₃₄ is Y or N, and X₃₅ is L or S; or
[0461] the sequence RASQSVX₄₈X₄₉X₅₀YLA, where X₄₈ is S or G, X₄₉ is S or R, and X₅₀ is S or N; or
[0462] the sequence TGTSSX₆₂VGX₆₃YX₆₄X₆₅VS, where X₆₂ is N or D, X₆₃ is D or G, X₆₄ is N or S, and X₆₅ is Y or H; or
[0463] the sequence SGX₆₉X₇₀SNIGSNX₇₁VX₇₂, where X₆₉ is S or L, X₇₀ is S or T, X₇₁ is Y, T or F, and X₇₂ is Y, H or N; or
[0464] the sequence TGTSSDVGGYNYVS; or
[0465] the sequence RASQSVSSSYLA; or
[0466] the sequence TGX₈₉X₉₀SDX₉₁GGYNX₉₂X₉₃S, where X₈₉ is N or T, X₉₀ is R or S, X₉₁ is I or V, X₉₂ is S or Y, and X₉₃ is L or V; or
[0467] the sequence SGSSSNIGNNYVS; or
[0468] the sequence GGNNIGSKSVH; or
[0469] the sequence X₁₀₆GTX₁₀₇SDVGGYNYVS, where X₁₀₆ is T or S, and X₁₀₇ is S or N; or
[0470] the sequence SGSSSNIGSNX₁₁₁VN, where X₁₁₁ is A or T; or
[0471] the sequence TGSSSNIGAGYDVH; or
[0472] the sequence RASQSVSSYLA; or
[0473] the sequence X₁₂₁GSX₁₂₂SNIGX₁₂₃NX₁₂₄VX₁₂₅, where X₁₂₁ is S or T, X₁₂₂ is S or R, X₁₂₃ is S or I, X₁₂₄ is T or S, and X₁₂₅ is S or N; or
[0474] the sequence SGSSSNIGSNTVN; or
[0475] the sequence TGTSSDIGGYNYVS; or
[0476] the sequence RASQSVSX₁₃₄X₁₃₅LA, where X₁₃₄ is S or T, and X₁₃₅ is Y or F; or
[0477] the sequence TGTSX₁₄₂DX₁₄₃GX₁₄₄YNYVS, where X₁₄₂ is T or S, X₁₄₃ is I or V, and X₁₄₄ is R or A; or
[0478] the sequence RASQX₁₆₁X₁₆₂X₁₆₃X₁₆₄X₁₆₅X₁₆₆A, where X₁₆₁ is S or G, X₁₆₂ is V or I, X₁₆₃ is S or R, X₁₆₄ is S or N, X₁₆₅ is Y, S or D, and X₁₆₆ is L or I; or
[0479] the sequence X₁₇₃ASQX₁₇₄ISSYLN, where X₁₇₃ is R or Q, and X₁₇₄ is S or D; or
[0480] the sequence SGSX₁₇₇SNIGX₁₇₈NYVX₁₇₉, where X₁₇₇ is S or G, X₁₇₈ is N or S, and X₁₇₉ is S or H; or
[0481] the sequence TGTRGDIGAYDGVS; or
[0482] the sequence TGTX₁₈₇X₁₈₈DX₁₈₉GX₁₉₀YX₁₉₁X₁₉₂VS, where X₁₈₇ is S or R, X₁₈₈ is S or G, X₁₈₉ is V or I, X₁₉₀ is G or A, X₁₉₁ is N or D, and X₁₉₂ is Y or G; or
[0483] the sequence SGSSSNIGX₂₀₅NX₂₀₆VX₂₀₇, where X₂₀₅ is S or N, X₂₀₆ is T or Y, and X₂₀₇ is N or S; or
[0484] the sequence TGTSX₂₁₃DVGX₂₁₄YNX₂₁₅VS, where X₂₁₃ is T or S, X₂₁₄ is G or S, and X₂₁₅ is Y or L; or
[0485] the sequence TGTSSDVGX₂₃₂YNYVS, where X₂₃₂ is N or G; or
[0486] the sequence RASQSVSSNLA; or
[0487] the sequence RASQGISNSL; or
[0488] the sequence RASQSVSSX₂₅₈LA, where X₂₅₈ is Y or F; or
[0489] the sequence SSSTGAVTRGHFPN; or
[0490] the sequence CRASQSVSSSYLA; or
[0491] the sequence RASQSISSYLN; or
[0492] the sequence TGTSSDVGGYNX₂₉₅VS, where X₂₉₅ is Y or N; or
[0493] the sequence SGSSSNIGX₃₀₈NYVS, where X₃₀₈ is R or N; or
[0494] the sequence SGSSSX₃₃₇X₃₃₈GSNX₃₃₉VN, where X₃₃₇ is N or D, X₃₃₈ is V or I, and X₃₃₉ is I or T; or
[0495] the sequence SGSSSNIGX₃₅₃NYVX₃₅₄, where X₃₅₃ is N or S, and X₃₅₄ is S or Y; or
[0496] the sequence SGSSSNIGX₃₇₃NYVX₃₇₄, where X₃₇₃ is N or S, and X₃₇₄ is S or N.

[0497] The LC CDR2 is:
[0498] the sequence X₃X₄NX₅RPS, where X₃ is S or T, X₄ is N or D, and X₅ Q is R; or
[0499] the sequence X₂₀NX₂₁X₂₂RPS, where X₂₀ is D or R, X₂₁ is N or S, and X₂₂ is K, R, Q or V; or
[0500] the sequence X₃₆ASX₃₇RAT, where X₃₆ is D or G, and X₃₇ is N, T or S; or
[0501] the sequence X₅₁ASX₅₂RAT, where X₅₁ is G or D, and X₅₂ is S or T or
[0502] the sequence X₆₆VX₆₇X₆₈RPS, where X₆₆ is D or E, X₆₇ is T or S, and X₆₈ is N or D; or
[0503] the sequence X₇₃NX₇₄X₇₅RPS, where X₇₃ is R or S, X₇₄ is N or D, and X₇₅ is Q or E; or
[0504] the sequence X₈₃VSNRPS, where X₈₃ is D or E; or
[0505] the sequence GASSRAT; or
[0506] the sequence DVX₉₄NRPS, where X₉₄ is N or S; or
[0507] the sequence DX₉₈X₉₉X₁₀₀RPS, where X₉₈ is N or D, X₉₉ is N or S, and X₁₀₀ is K or D; or
[0508] the sequence DVX₁₀₈KRPS, where X₁₀₈ is S or T; or
[0509] the sequence X₁₁₂NSX₁₁₃RPS, where X₁₁₂ is G or S, and X₁₁₃ is N or Y; or
[0510] the sequence DASNRAT; or
[0511] the sequence SNNQRPS; or
[0512] the sequence X₁₂₇NX₁₂₈X₁₂₉RPS, where X₁₂₇ is G or S, X₁₂₈ is S or N, and X₁₂₉ is N or Q; or
[0513] the sequence X₁₃₂X₁₃₃SKRPS, where X₁₃₂ is A or Q, and X₁₃₃ is V or D; or
[0514] the sequence DASNRA; or
[0515] the sequence DVSKRPS; or
[0516] the sequence DNNKRPS; or
[0517] the sequence X₁₅₂NNX₁₅₃RPS, where X₁₅₂ is S, T or N, and X₁₅₃ is Q or R; or
[0518] the sequence DX₁₆₇SX₁₆₈X₁₆₉X₁₇₀T, where X₁₆₇ is A or T, X₁₆₈ is N or T, X₁₆₉ is R or L, and X₁₇₀ is A or E; or
[0519] the sequence AASRLES; or
[0520] the sequence X₁₇₅ASSLX₁₇₆S, where X₁₇₅ is K or A, and X₁₇₆ is E or Q; or
[0521] the sequence X₁₈₀NX₁₈₁X₁₈₂RPS, where X₁₈₀ is D or R, X₁₈₁ is N or S, and X₁₈₂ is K or G; or
[0522] the sequence AVTQRPS; or
[0523] the sequence X₁₈₄NX₁₈₅X₁₈₆RPS, where X₁₈₄ is G or D, X₁₈₅ is S or N, and X₁₈₆ is Nor K; or
[0524] the sequence X₁₉₃VX₁₉₄X₁₉₅RPS, where X₁₉₃ is D or A, X₁₉₄ is S or T, and X₁₉₅ is K or Q; or
[0525] the sequence X₂₀₈NNX₂₀₉RPS, where X₂₁₈ is S or D, and X₂₀₉ is Q or K; or
[0526] the sequence DVSX₂₁₆RPS, where X₂₁₆ is K or N; or
[0527] the sequence DVX₂₁₇KRPS, where X₂₁₇ is G or S; or
[0528] the sequence GNSNRPS; or
[0529] the sequence DVSX₂₃₃RPS, where X₂₃₃ is N or K; or
[0530] the sequence X₂₅₀AX₂₅₁X₂₅₂RX₂₅₃X₂₅₄, where X₂₅₀ is W or A, X₂₅₁ is S or A, X₂₅₂ is T or S, X₂₅₃ is E or L, and X₂₅₄ is S or E; or
[0531] the sequence YDSDRPS; or
[0532] the sequence STSNKHS; or
[0533] the sequence AASSLQS; or
[0534] the sequence DVSX₂₉₃RPS, where X₂₉₃ is K or N; or
[0535] the sequence DVSX₂₉₆RPS, where X₂₉₆ is N or K; or
[0536] the sequence DNNX₃₀₉RPS, where X₃₀₉ is R or K; or
[0537] the sequence X₃₄₀NNQRPS, where X₃₄₀ is N or S; or
[0538] the sequence X₃₅₅NNX₃₅₆RPS, where X₃₅₅ is D or R, and X₃₅₆ is K or Q; or
[0539] the sequence X₃₇₅NNX₃₇₆RPS, where X₃₇₅ is D or S, and X₃₇₆ is K or Q.

[0540] The LC CDR3 is:
[0541] the sequence AX₆X₇DDX₈LX₉X₁₀X₁₁X₁₂, where X₆ is A or S, X₇ is W or R, X₈ is S or R, X₉ is N or S, X₁₀ is A or G, X₁₁ is S, L, V, Y, P, A or T, X₁₂ is L or V; or
[0542] the sequence X₂₃X₂₄WDX₂₅SLSX₂₆X₂₇V, where X₂₃ is G or A, X₂₄ is T or A, X₂₅ is S, N, D or T, X₂₆ is A, G or S, and X₂₇ is W or Y; or
[0543] the sequence GTWDSSLSAYWV; or
[0544] the sequence X₃₈QX₃₉X₄₀X₄₁X₄₂PX₄₃T, where X₃₈ is Q or H, X₃₉ is Y or H, X₄₀ is G, N, Y or H, X₄₁ is S, N, T, Q or R, X₄₂ is S, W or V, and X₄₃ is L, F, I or Q; or
[0545] the sequence QQYGSSPSIT; or
[0546] the sequence QQYGX₅₃SPX₅₄X₅₅, where X₅₃ is S or T, X₅₄ is L or I, and X₅₅ is T or A; or
[0547] the sequence SSYTSGSTPVV; or
[0548] the sequence NSYTSSSTWV; or
[0549] the sequence X₇₆X₇₇WDDX₇₈LX₇₉GX₈₀V, where X₇₆ is A or S, X₇₇ is A or T, X₇₈ is S or T, X₇₉ is S, N or V, and X₈₀ is R or K; or
[0550] the sequence SSYAGSNYVV; or
[0551] the sequence SSYTSSSTX₈₄X₈₅V, where X₈₄ is L or R, and X₈₅ is G or Y; or
[0552] the sequence QQYGSSPX₈₇T, where X₈₇ is Y or F; or
[0553] the sequence QQYGSSPALT; or
[0554] the sequence X₉₅SYTSX₉₆X₉₇TWV, where X₉₅ is N or S, X₉₆ is K or S, and X₉₇ is Nor S; or
[0555] the sequence GTWDSSLSAGWV; or
[0556] the sequence X₁₀₁X₁₀₂WDSSX₁₀₃X₁₀₄X₁₀₅VV, where X₁₀₁ is G or Q, X₁₀₂ is T or V, X₁₀₃ is L or S, X₁₀₄ is S or D, and X₁₀₅ is A or H; or
[0557] the sequence SSYTSSX₁₀₉TWV, where X₁₀₉ is S or R; or
[0558] the sequence SSYTSSSTPWV; or
[0559] the sequence QSYDSX₁₁₄LX₁₁₅X₁₁₆X₁₁₇X₁₁₈, where X₁₁₄ is S or A, X₁₁₅ is S or R, X₁₁₆ is D or G, X₁₁₇ is V or P, and X₁₁₈ is V or L; or
[0560] the sequence QQRRNWPPX₁₁₉X₁₂₀T, where X₁₁₉ is V or R, and X₁₂₀ is L or I; or
[0561] the sequence AAWDDSLNGX₁₂₆V, where X₁₂₆ is V or Y; or
[0562] the sequence AAWDDSLX₁₃₀GX₁₃₁V, where X₁₃₀ is G or N, and X₁₃₁ is P or W; or
[0563] the sequence SSYTSSSGTLNV;
[0564] the sequence QAWDSSTV;
[0565] the sequence QQRSNWPPX₁₃₆X₁₃₇T, where X₁₃₆ is A, R, K or M, and X₁₃₇ is L, I or Y; or
[0566] the sequence SYTSSSTYA; or
[0567] the sequence X₁₄₅X₁₄₆WDX₁₄₇SLSX₁₄₈X₁₄₉X₁₅₀, where X₁₄₅ is G or E, X₁₄₆ is T or A, X₁₄₇ is S or T, X₁₄₈ is A or D, X₁₄₉ is V or G, and X₁₅₀ is V or L; or
[0568] the sequence AAWDDSLX₁₅₄GX₁₅₅V, where X₁₅₄ is N or S, and X₁₅₅ is L, P, W or V; or
[0569] the sequence or AAWDDSLNGX₁₅₆VV, where X₁₅₆ is S or H; or
[0570] the sequence QQYYX₁₇₁TPX₁₇₂T, where X₁₇₁ is S or T, and X₁₇₂ is F or I; or
[0571] the sequence QQSYSTWT; or
[0572] the sequence AAWDDSLX₁₈₃GWV, where X₁₈₃ is N or S; or
[0573] the sequence AAWDDSLNGVV; or
[0574] the sequence SSYTSSSSWV; or
[0575] the sequence QSYDSSLSGLWV; or
[0576] the sequence QSYDSSLSAWV; or
[0577] the sequence SSYTX₁₉₆SSX₁₉₇WV, where X₁₉₆ is T or S, and X₁₉₇ is T or S; or
[0578] the sequence AAWDDSLX₂₁₀GPV, where X₂₁₀ is N or S; or
[0579] the sequence SSYTSSSTLV; or
[0580] the sequence SSYTSSSTX₂₁₈V, where X₂₁₈ is W or L; or
[0581] the sequence QSYDSSLSGX₂₂₅WV, where X₂₂₅ is P or S; or
[0582] the sequence SSYTSSX₂₃₄TX₂₃₅V, where X₂₃₄ is G or S, and X₂₃₅ is L or Y; or
[0583] the sequence QSYDSSLSGWV; or
[0584] the sequence LQYFTIPWT; or
[0585] the sequence SQQYYSTPYT; or
[0586] the sequence QQYGSSPPIT; or
[0587] the sequence QQRSNWPPSIT; or
[0588] the sequence QVWDSSSDHWV; or
[0589] the sequence LLYDAGAPGWV; or
[0590] the sequence GAWDSSLSTPNW;
[0591] the sequence AAWDDSLNGWV;
[0592] the sequence QQYGSSPX₂₆₉T, where X₂₆₉ is Y or P; or
[0593] the sequence QQSYSTPLT; or
[0594] the sequence QQSYSTPX₂₇₅T, where X₂₇₅ is F or L; or
[0595] the sequence QSYDSSLSGPNWV; or
[0596] the sequence QSYDSRLRAVV; or
[0597] the sequence QSYDSSLSGX₂₉₄V, where X₂₉₄ is V or P; or
[0598] the sequence SSYTSSSPWV; or
[0599] the sequence GTWDSSLSAVX₃₁₀, where X₃₁₀ is A or V; or
[0600] the sequence GTWDSSLSAX₃₂₁V, where X₃₂₁ is G or V; or
[0601] the sequence AAWDDSLNX₃₄₁WV, where X₃₄₁ is A or G; or
[0602] the sequence X₃₅₇X₃₅₈WDX₃₅₉SLSX₃₆₀X₃₆₁X₃₆₂, where X₃₅₇ is G or A, X₃₅₈ is T or A, X₃₅₉ is S or D, X₃₆₀ is A or G, X₃₆₁ is G or W, and X₃₆₂ is P or V; or
[0603] the sequence X₃₇₇TWDX₃₇₈SLX₃₇₉X₃₈₀X₃₈₁V, where X₃₇₇ is G or A, X₃₇₈ is S or D, X₃₇₉ is S or N, X₃₈₀ is A or G, and X₃₈₁ is G or Q.

[0604] The HC CDR1 is:
[0605] the sequence GYYWS; or
[0606] the sequence X₂₈YYMH, where X₂₈ is S or G; or
[0607] the sequence X₄₄SSYYWG, where X₄₄ is S or G; or
[0608] the sequence SX₅₆X₅₇YYWX₅₈, where X₅₆ is S or G, X₅₇ is S or G, and X₅₈ is G or S; or
[0609] the sequence SSSYYWG; or
[0610] the sequence SYAIS; or
[0611] the sequence SYAMX₈₆, where X₈₆ is S or N; or
[0612] the sequence SSPMH; or
[0613] the sequence DYGMH; or
[0614] the sequence X₁₁₀YAMH, where X₁₁₀ is S or G; or
[0615] the sequence SYGIS; or
[0616] the sequence TYGMH; or
[0617] the sequence SYAIX₁₃₈, where X₁₃₈ is S or I; or
[0618] the sequence EVAIH; or
[0619] the sequence RYAMS; or
[0620] the sequence SX₁₅₇WIX₁₅₈, where X₁₅₇ is H or Y, and X₁₅₈ is A, V or G; or
[0621] the sequence DYYIQ; or
[0622] the sequence SYAMH; or
[0623] the sequence SNYMS; or
[0624] the sequence ELSX₁₉₈H, where X₁₉₈ is I or M; or
[0625] the sequence X₂₁₁YAMS, where X₂₁₁ is S or R; or
[0626] the sequence NYGMH; or
[0627] the sequence X₂₁₉YAIS, where X₂₁₉ is F or R; or
[0628] the sequence RYAIX₂₂₆, where X₂₂₆ is N or S; or
[0629] the sequence ELSIH; or
[0630] the sequence NYGIS; or
[0631] the sequence NAWMX₂₅₅, where X₂₅₅ is S or T; or
[0632] the sequence DYAMS; or
[0633] the sequence SYYIH; or
[0634] the sequence SYPMH; or
[0635] the sequence X₂₆₀X₂₆₁AMX₂₆₂, where X₂₆₀ is S or N, X₂₆₁ is F or Y, and X₂₆₂ is H or N; or
[0636] the sequence NYVIN; or
[0637] the sequence SNYMX₂₇₀, where X₂₇₀ is T or S, or
[0638] the sequence SX₂₇₆AX₂₇₇X₂₇₈, where X₂₇₆ is Y or S, X₂₇₇ is M or I, and X₂₇₈ is H or N, or
[0639] the sequence TQYLH; or
[0640] the sequence RGDYWG; or
[0641] the sequence THALS; or
[0642] the sequence DYAMH; or
[0643] the sequence SYDIS; or
[0644] the sequence SYAX₂₉₇S, where X₂₉₇ is M or I; or
[0645] the sequence SYX₃₁₁X₃₁₂X₃₁₃, where X₃₁₁ is Y or A, X₃₁₂ is M or I, and X₃₁₃ is H or I; or
[0646] the sequence SX₃₂₂X₃₂₃IX₃₂₄, where X₃₂₂ is N or Y, X₃₂₃ is W or V, and X₃₂₄ is A or S; or
[0647] the sequence NHWIA; or
[0648] the sequence NYAIN; or
[0649] the sequence TSGVGVG; or
[0650] the sequence ELPIH; or
[0651] the sequence DYX₃₈₂MX₃₈₃, where X₃₈₂ is G or W, and X₃₈₃ is H or S.

[0652] The HC CDR2 is:
[0653] the sequence EINHSGSTNYNPSLKS; or
[0654] the sequence X₂₉INRSGGSTIYAQTFQX₃₀, where X₂₉ is I or V, X₃₀ is G or S; or
[0655] the sequence X₄₅IX₄₆YSGSTYYNPSLKS, where X₄₅ is S or N, and X₄₆ is Y or F; or
[0656] the sequence X₅₉IX₆₀YSGSTYYNPSLKS, where X₅₉ is S, Y or N, and X₆₀ is Y or F; or
[0657] the sequence NIFYSGSTYYNPSLKS;
[0658] the sequence GIIPIFGTANYAQX₈₁FQX₈₂, where X₈₁ is K or R, and X₈₂ is G or D; or
[0659] the sequence AISGSGGTTYYADSVKG; or
[0660] the sequence VISYX₈₈GSNKYYADSVKG, where X₈₈ is D or G; or
[0661] the sequence VISYDGSNKYYADSVKG; or
[0662] the sequence AISYDGSNKYYADSVKG; or
[0663] the sequence VISYDGSHKNYADSVKG; or
[0664] the sequence GIIPILATTKFAQKFQG; or
[0665] the sequence GIIPIFGTANYAQKFQG; or
[0666] the sequence VISYDGFNKYYADSVKG;
[0667] the sequence GFDPEDGETSYAQKFQG; or
[0668] the sequence AISGSGGX₁₅₁TYYADSVKG, where X₁₅₁ is S or T; or
[0669] the sequence X₁₅₉IYPGDSDSRYSPSFQG, where X₁₅₉ is I or T; or
[0670] the sequence WINPNSGDTNYAHKFQG; or
[0671] the sequence GIIPMFGTTNYAQKFQG; or
[0672] the sequence AISGSGGSTYYADSVKG; or
[0673] the sequence VIYPGGSTFFADSVQG; or
[0674] the sequence GFDPEDX₁₉₉ETIYAQKFQG, where X₁₉₉ is G or A; or
[0675] the sequence AISGSGGX₂₁₂TYYADSVKG, where X₂₁₂ is D or S; or
[0676] the sequence VMSYDGSNKYYADSVKG; or
[0677] the sequence GIIPX₂₂₀FGX₂₂₁X₂₂₂X₂₂₃YAQX₂₂₄FQD, where X₂₂₀ is L or I, X₂₂₁ is T or K, X₂₂₂ is A or V, X₂₂₃ is K or N, and X₂₂₄ is R or K; or
[0678] the sequence GIIPX₂₂₇X₂₂₈GTX₂₂₉X₂₃₀YX₂₃₁QKFQG, where X₂₂₇ is L or I, X₂₂₈ is L or F, X₂₂₉ is A or G, X₂₃₀ is D or N, and X₂₃₁ is P or A; or
[0679] the sequence GFDPEX₂₃₆X₂₃₇ETIX₂₃₈AQX₂₃₉FQG, where X₂₃₆ is N or D, X₂₃₇ is G or A, X₂₃₈ is H or Y, and X₂₃₉ is R or K; or
[0680] the sequence X₂₄₆ISX₂₄₇X₂₄₈NGNTX₂₄₉YAQKLQG, where X₂₄₆ is G or W, X₂₄₇ is S or A, X₂₄₈ is H or Y, and X₂₄₉ is K or N; or
[0681] the sequence RIKTKTDGGTTDYAAPVKG; or
[0682] the sequence GIIPIFGTX₂₅₉NYAQKFQG, where X₂₅₉ is T or A; or
[0683] the sequence VISGSGGSTSNADSVKG; or
[0684] the sequence FINPSDVTTYYAQKFQG; or
[0685] the sequence VISYDGSLKYYVDSVKG; or
[0686] the sequence X₂₆₃ISX₂₆₄X₂₆₅GX₂₆₆X₂₆₇X₂₆₈YYADSVKG, where X₂₆₃ is V or T, X₂₆₄ is F or G, X₂₆₅ is D or S, X₂₆₆ is S or G, X₂₆₇ is N or S, and X₂₆₈ is K or T; or
[0687] the sequence GFIPVFGIADYAQKFQG; or
[0688] the sequence X₂₇₁IYPGGSTX₂₇₂X₂₇₃ADSVX₂₇₄G, where X₂₇₁ is I or V, X₂₇₂ is Y or F, X₂₇₃ is Y or F, and X₂₇₄ is K or Q; or
[0689] the sequence VISYDGINKYYADSVKG; or
[0690] the sequence GIIPIFGTVNYAQKFQG; or
[0691] the sequence X₂₈₆IX₂₈₇PX₂₈₈X₂₈₉GX₂₉₀X₂₉₁X₂₉₂YAQKFQG, where X₂₈₆ is G or I, X₂₈₇ is I or N, X₂₈₈ is F or Y, X₂₈₉ is F or G, X₂₉₀ is T or S, X₂₉₁ is S or T, and X₂₉₂ is N or T; or
[0692] the sequence SIYHSGSTYYNPSLKS; or
[0693] the sequence GIIPIFGPADYAQKFQG; or
[0694] the sequence GISWNSGTIGYADSVKG; or
[0695] the sequence GIIPILGIPNYAQKFQG; or
[0696] the sequence GIX₂₉₈X₂₉₉X₃₀₀X₃₀₁GX₃₀₂TX₃₀₃YAX₃₀₄X₃₀₅X₃₀₆X₃₀₇G, where X₂₉₅ is S or I, X₂₉₉ is G or P, X₃₀₀ is S or M, X₃₀₁ is G or F, X₃₀₂ is S or T, X₃₀₃ is Y or N, X₃₀₄ is D or Q, X₃₀₅ is S or K, X₃₀₆ is V or F, and X₃₀₇ is K or Q; or
[0697] the sequence X₃₁₄IX₃₁₅PX₃₁₆X₃₁₇GX₃₁₈X₃₁₉X₃₂₀YAQKFQG, where X₃₁₄ is I or G, X₃₁₅ is N or I, X₃₁₆ is S or I, X₃₁₇ is G or F, X₃₁₈ is S or T, X₃₁₉ is T or A, and X₃₂₀ is S or N; or
[0698] the sequence X₃₂₅IX₃₂₆PX₃₂₇X₃₂₈X₃₂₉X₃₃₀X₃₃₁X₃₃₂X₃₃₃X₃₃₄X₃₃₅X₃₃₆FQG, where X₃₂₅ is I or R, X₃₂₆ is Y or I, X₃₂₇ is G or I, X₃₂₈ is D or F, X₃₂₉ is S or G, X₃₃₀ is D or T, X₃₃₁ is T or V, X₃₃₂ is R or K, X₃₃₃ is N or Y, X₃₃₄ is S or A, X₃₃₅ is P or Q, and X₃₃₆ is S or K; or
[0699] the sequence X₃₄₂IX₃₄₃PX₃₄₄X₃₄₅X₃₄₆X₃₄₇X₃₄₈X₃₄₉YX₃₅₀X₃₅₁X₃₅₂FQG, where X₃₄₂ is I or G, X₃₄₃ is Y or I, X₃₄₄ is Y or I, X₃₄₅ is D or F, X₃₄₆ is S or G, X₃₄₇ is D or T, X₃₄₈ is T or A, X₃₄₉ is K or N, X₃₅₀ is S or A, X₃₅₁ is P or Q, and X₃₅₂ is S or K; or
[0700] the sequence LIDWDDNKYYTTSLKT; or
[0701] the sequence RFDPEDGETIYAQNFQG; or
[0702] the sequence X₃₈₄IX₃₈₅X₃₈₆DGSX₃₈₇KYYX₃₈₈DSVKG, where X₃₈₄ is A or N, X₃₈₅ is S or K, X₃₈₆ is Y or E, X₃₈₇ is N or E, and X₃₈₈ is A or V.

[0703] The HC CDR3 is:
[0704] the sequence GRYSSNWYEAWTPRGIGMDV; or
[0705] the sequence GGRHSLDX₃₁, where X₃₁ is V or A; or
[0706] the sequence GSRGYYDX₄₇LTGYSTGGFDY, where X₄₇ is F or I; or
[0707] the sequence GSRGYYDX₆₁LTGYSTGGFDY, where X₆₁ is F or I; or
[0708] the sequence GSRGYYDILTGYSTGGFDY; or
[0709] the sequence DGVVVPAVMYDTTDPYYYGMDV; or
[0710] the sequence APSDLSFIWTGYYSEYYFDY;
[0711] the sequence EIALNNYYGMDV; or
[0712] the sequence DSGLYGSGWSTYQYYAMDV; or
[0713] the sequence DNCGGDCGGGMDV; or
[0714] the sequence GWGLRLFGEFSVWFDP; or
[0715] the sequence VEGYDSSGYYLDY; or
[0716] the sequence RYSSNWYEAWTPRGIGMDV; or
[0717] the sequence SLGGNYYYGMDV; or
[0718] the sequence VX₁₃₉GYDX₁₄₀SGYYQX₁₄₁Y, where X₁₃₉ is T or S, X₁₄₀ is S or G, and X₁₄₁ is D or E; or
[0719] the sequence GPVLGLSKWLEFDP; or
[0720] the sequence GPRGQDYGDYGFLDY; or
[0721] the sequence GPNX₁₆₀YNWFDS, where X₁₆₀ is L or I; or
[0722] the sequence GGSYYNVMYWFDP; or
[0723] the sequence ARGGSYLYGMDV; or
[0724] the sequence DPTSRSTYYYYSGSYYP; or
[0725] the sequence SYDFLTDYTDAFDI;
[0726] the sequence SPAX₂₀₀X₂₀₁X₂₀₂X₂₀₃X₂₀₄WFDP, where X₂₀₀ is V or I, X₂₀₁ is T or I, X₂₀₂ is T or R, X₂₀₃ is A or V, and X₂₀₄ is G or D; or
[0727] the sequence VRYYDFWSGWDVMDV; or
[0728] the sequence PDDSSGYYPDY; or
[0729] the sequence GGWIYRGNWFDP; or
[0730] the sequence GGSTWYGGNWFDP; or
[0731] the sequence TLYYYDRSGNARTDDYFDH; or
[0732] the sequence SLYYYDRSGYPISEDYFDY; or
[0733] the sequence SX₂₄₀X₂₄₁X₂₄₂X₂₄₃X₂₄₄AX₂₄₅WFDP, where X₂₄₀ is T or P, X₂₄₁ is P or A, X₂₄₂ is M or V, X₂₄₃ is I or T, X₂₄₄ is R or T, and X₂₄₅ is S or G; or
[0734] the sequence EGGYYYGSGSYYNPRFAFDI; or
[0735] the sequence PRGYSGYGSNWYF; or
[0736] the sequence X₂₅₆SX₂₅₇PDY, where X₂₅₅ is F or H, and X₂₅₇ is T or R; or
[0737] the sequence DPTGWYSGYFDY; or
[0738] the sequence VGTYDSSGYSFDY; or
[0739] the sequence VYCGDDCYPVVGTPGDAFDI; or
[0740] the sequence SRIAPTEDFFDY; or
[0741] the sequence DSSCSGGSCFDY; or
[0742] the sequence GDYYGSGSYYNPSPFFDY; or
[0743] the sequence GYALNP; or
[0744] the sequence SGLFDWLLPRSRHRDYFDY; or
[0745] the sequence DLPLTGTTLDY; or
[0746] the sequence X₂₇₉X₂₈₀X₂₈₁X₂₈₂X₂₈₃X₂₈₄X₂₈₅YGMDV, where X₂₇₉ is A or D, X₂₈₀ is L or H, X₂₈₁ is G or I, X₂₈₂ is G or V, X₂₈₃ is N or S, X₂₈₄ is Y or P, and X₂₈₅ is Y or L; or
[0747] the sequence GQFSDSSGYQHPYYDYGMD; or
[0748] the sequence SPSGYYGDYEGDAFDI; or
[0749] the sequence HGTSGYYYPNWFDP; or
[0750] the sequence GLSLGFCSAGSCYDYLDY; or
[0751] the sequence EELGPYSNRWYSSSDGMDV; or
[0752] the sequence SRGYSGYGANWYFDL; or
[0753] the sequence GVVTADWYFDL; or
[0754] the sequence GGDHGMDV; or
[0755] the sequence VTGYDSSGYYQDY; or
[0756] the sequence LAYFHPQRNGGYEYYFDY; or
[0757] the sequence DLPGDSRDGYNYDAFDI; or
[0758] the sequence NPTVTNWFDS; or
[0759] the sequence DRYPGYYDILTGQIGTGERNAMDV; or
[0760] the sequence X₃₆₃X₃₆₄X₃₆₅X₃₆₆X₃₆₇X₃₆₈X₃₆₉X₃₇₀X₃₇₁X₃₇₂YYYYGMDV, where X₃₆₃ is I or D, X₃₆₄ is P or L, X₃₆₅ is G or T, X₃₆₆ is F or T, X₃₆₇ is L or V, X₃₆₈ is R or T, X₃₆₉ is Y or N, X₃₇₀ is R or P, X₃₇₁ is N or L, and X₃₇₂ is R or N; or
[0761] the sequence GYSGNF.

[0762] In another embodiment of the present invention, the binding molecule may be a binding molecule that binds to a spike protein (S protein) on the surface of SARS-coronavirus-2 (SARS-CoV-2), wherein the binding molecule comprises a light-chain variable region comprising LC CDR1, LC CDR2 and LC CDR3, and a heavy-chain variable region comprising HC CDR1, HC CDR2 and HC CDR3, and is any one selected from the group consisting of the following binding molecules 1) to 49):
[0763] 1) a binding molecule in which the LC CDR1 comprises the sequence SGSX₁SNIGX₂NTVN, where X₁ is S or T, and X₂ is S or T,
[0764] the LC CDR2 comprises the sequence X₃X₄NX₅RPS, where X₃ is S or T, X₄ is N or D, and X₅ is Q or R,
[0765] the LC CDR3 comprises the sequence AX₆X₇DDX₈LX₉X₁₀X₁₁X₁₂, where X₆ is A or S, X₇ is W or R, X₈ is S or R, X₉ is N or S, X₁₀ is A or G, X₁₁ is S, L, V, Y, P, A or T, X₁₂ is L or V,
[0766] the HC CDR1 comprises the sequence GYYWS,
[0767] the HC CDR2 comprises the sequence EINHSGSTNYNPSLKS, and
[0768] the HC CDR3 comprises the sequence GRYSSNWYEAWTPRGIGMDV;
[0769] 2) a binding molecule in which the LC CDR1 comprises the sequence X₁₃GSX₁₄SX₁₅IX₁₆X₁₇X₁₈X₁₉VS, where X₁₃ is S or T, X₁₄ is S or N, X₁₅ is N or S, X₁₆ is G or E, X₁₇ is N or S, X₁₈ is N or S, and X₁₉ is Y or F,
[0770] the LC CDR2 comprises the sequence X₂₀NX₂₁X₂₂RPS, where X₂₀ is D or R, X₂₁ is N or S, and X₂₂ is K, R, Q or V,
[0771] the LC CDR3 comprises the sequence X₂₃X₂₄WDX₂₅SLSX₂₆X₂₇V or GTWDSSLSAYWV, where X₂₃ is G or A, X₂₄ is T or A, X₂₅ is S, N, D or T, X₂₆ is A, G or S, and X₂₇ is W or Y,
[0772] the HC CDR1 comprises the sequence X₂₈YYMH, where X₂₈ is S or G,
[0773] the HC CDR2 comprises the sequence X₂₉INRSGGSTIYAQTFQX₃₀, where X₂₉ is I or V, X₃₀ is G or S, and
[0774] the HC CDR3 comprises the sequence GGRHSLDX₃₁, where X₃₁ is V or A;
[0775] 3) a binding molecule in which the LC CDR1 comprises the sequence RASQSVX₃₂X₃₃X₃₄X₃₅A, where X₃₂ is S, N or R, X₃₃ is S or N, X₃₄ is Y or N, and X₃₅ is L or S,
[0776] the LC CDR2 comprises the sequence X₃₆ASX₃₇RAT, where X₃₆ is D or G, and X₃₇ is N, T or S,
[0777] the LC CDR3 comprises the sequence X₃₈QX₃₉X₄₀X₄₁X₄₂PX₄₃T or QQYGSSPSIT, where X₃₈ is Q or H, X₃₉ is Y or H, X₄₀ is G, N, Y or H, X₄₁ is S, N, T, Q or R, X₄₂ is S, W or V, and X₄₃ is L, F, I or Q,
[0778] the HC CDR1 comprises the sequence X₄₄SSYYWG, where X₄₄ is S or G,
[0779] the HC CDR2 comprises the sequence X₄₅IX₄₆YSGSTYYNPSLKS, where X₄₅ is S or N, and X₄₆ is Y or F, and
[0780] the HC CDR3 comprises the sequence GSRGYYDX₄₇LTGYSTGGFDY, where X₄₇ is F or I;
[0781] 4) a binding molecule in which the LC CDR1 comprises the sequence RASQSVX₄₈X₄₉X₅₀YLA, where X₄₈ is S or G, X₄₉ is S or R, and X₅₀ is S or N,
[0782] the LC CDR2 comprises the sequence X₅₁ASX₅₂RAT, where X₅₁ is G or D, and X₅₂ is S or T,
[0783] the LC CDR3 comprises the sequence QQYGX₅₃SPX₅₄X₅₅, where X₅₃ is S or T, X₅₄ is L or I, and X₅₅ is T or A,
[0784] the HC CDR1 comprises the sequence SX₅₆X₅₇YYWX₅₈, where X₅₆ is S or G, X₅₇ is S or G, and X₅₈ is G or S,
[0785] the HC CDR2 comprises the sequence X₅₉IX₆₀YSGSTYYNPSLKS, where X₅₉ is S, Y or N, and X₆₀ is Y or F, and
[0786] the HC CDR3 comprises the sequence GSRGYYDX₆₁LTGYSTGGFDY, where X₆₁ is F or I;
[0787] 5) a binding molecule in which the LC CDR1 comprises the sequence TGTSSX₆₂VGX₆₃YX₆₄X₆₅VS, where X₆₂ is N or D, X₆₃ is D or G, X₆₄ is N or S, and X₆₅ is Y or H,
[0788] the LC CDR2 comprises the sequence X₆₆VX₆₇X₆₈RPS, where X₆₆ is D or E, X₆₇ is T or S, and X₆₈ is N or D,
[0789] the LC CDR3 comprises the sequence SSYTSGSTPVV or NSYTSSSTWV,
[0790] the HC CDR1 comprises the sequence SSSYYWG,
[0791] the HC CDR2 comprises the sequence NIFYSGSTYYNPSLKS, and
[0792] the HC CDR3 comprises the sequence GSRGYYDILTGYSTGGFDY;
[0793] 6) a binding molecule in which the LC CDR1 comprises the sequence SGX₆₉X₇₀SNIGSNX₇₁VX₇₂, where X₆₉ is S or L, X₇₀ is S or T, X₇₁ is Y, T or F, and X₇₂ is Y, H or N,
[0794] the LC CDR2 comprises the sequence X₇₃NX₇₄X₇₅RPS, where X₇₃ is R or S, X₇₄ is N or D, and X₇₅ is Q or E,
[0795] the LC CDR3 comprises the sequence X₇₆X₇₇WDDX₇₈LX₇₉GX₈₀V, where X₇₆ is A or S, X₇₇ is A or T, X₇₈ is S or T, X₇₉ is S, N or V, and X₈₀ is R or K,
[0796] the HC CDR1 comprises the sequence SYAIS,
[0797] the HC CDR2 comprises the sequence GIIPIFGTANYAQX₈₁FQX₈₂, where X₈₁ is K or R, and X₈₂ is G or D, and
[0798] the HC CDR3 comprises the sequence DGVVVPAVMYDTTDPYYYGMDV;
[0799] 7) a binding molecule in which the LC CDR1 comprises the sequence TGTSSDVGGYNYVS,
[0800] the LC CDR2 comprises the sequence X₈₃VSNRPS, where X₈₃ is D or E,
[0801] the LC CDR3 comprises the sequence SSYAGSNYVV or SSYTSSSTX₈₄X₈₅V, where X₈₄ is L or R, and X₈₅ is G or Y,
[0802] the HC CDR1 comprises the sequence SYAMX₈₆, where X₈₆ is S or N,
[0803] the HC CDR2 comprises the sequence AISGSGGTTYYADSVKG, and
[0804] the HC CDR3 comprises the sequence APSDLSFIWTGYYSEYYFDY;
[0805] 8) a binding molecule in which the LC CDR1 comprises the sequence RASQSVSSSYLA,
[0806] the LC CDR2 comprises the sequence GASSRAT,
[0807] the LC CDR3 comprises the sequence QQYGSSPX₈₇T or QQYGSSPALT, where X₈₇ is Y or F,
[0808] the HC CDR1 comprises the sequence SSPMH,
[0809] the HC CDR2 comprises the sequence VISYX₈₈GSNKYYADSVKG, where X₈₈ is D or G, and
[0810] the HC CDR3 comprises the sequence EIALNNYYGMDV;
[0811] 9) a binding molecule in which the LC CDR1 comprises the sequence TGX₈₉X₉₀SDX₉₁GGYNX₉₂X₉₃S, where X₈₉ is N or T, X₉₀ is R or S, X₉₁ is I or V, X₉₂ is S or Y, and X₉₃ is L or V,
[0812] the LC CDR2 comprises the sequence DVX₉₄NRPS, where X₉₄ is N or S,
[0813] the LC CDR3 comprises the sequence X₉₅SYTSX₉₆X₉₇TWV, where X₉₅ is N or S, X₉₆ is K or S, and X₉₇ is N or S,
[0814] the HC CDR1 comprises the sequence SSPMH,
[0815] the HC CDR2 comprises the sequence VISYDGSNKYYADSVKG, and
[0816] the HC CDR3 comprises the sequence EIALNNYYGMDV;
[0817] 10) a binding molecule in which the LC CDR1 comprises the sequence SGSSSNIGNNYVS or GGNNIGSKSVH,
[0818] the LC CDR2 comprises the sequence DX₉₈X₉₉X₁₀₀RPS, where X₉₈ is N or D, X₉₉ is N or S, and X₁₀₀ is K or D,
[0819] the LC CDR3 comprises the sequence GTWDSSLSAGWV or X₁₀₁X₁₀₂WDSSX₁₀₃X₁₀₄X₁₀₅VV, where X₁₀₁ is G or Q, X₁₀₂ is T or V, X₁₀₃ is L or S, X₁₀₄ is S or D, and X₁₀₅ is A or H,
[0820] the HC CDR1 comprises the sequence DYGMH,
[0821] the sequence HC CDR2 comprises the sequence AISYDGSNKYYADSVKG, and
[0822] the HC CDR3 comprises the sequence DSGLYGSGWSTYQYYAMDV;
[0823] 11) a binding molecule in which the LC CDR1 comprises the sequence X₁₀₆GTX₁₀₇SDVGGYNYVS, where X₁₀₆ is T or S, and X₁₀₇ is S or N,
[0824] the LC CDR2 comprises the sequence DVX₁₀₈KRPS, where X₁₀₈ is S or T,
[0825] the LC CDR3 comprises the sequence SSYTSSX₁₀₉TWV or SSYTSSSTPWV, where X₁₀₉ is S or R,
[0826] the HC CDR1 comprises the sequence X₁₁₀YAMH, where X₁₁₀ is S or G,
[0827] the HC CDR2 comprises the sequence VISYDGSHKNYADSVKG, and
[0828] the HC CDR3 comprises the sequence DNCGGDCGGGMDV;
[0829] 12) a binding molecule in which the LC CDR1 comprises the sequence SGSSSNIGSNX₁₁₁VN or TGSSSNIGAGYDVH, where X₁₁₁ is A or T,
[0830] the LC CDR2 comprises the sequence X₁₁₂NSX₁₁₃RPS, where X₁₁₂ is G or S, and X₁₁₃ is N or Y,
[0831] the LC CDR3 comprises the sequence QSYDSX₁₁₄LX₁₁₅X₁₁₆X₁₁₇X₁₁₈, where X₁₁₄ is S or A, X₁₁₅ is S or R, X₁₁₆ is D or G, X₁₁₇ is V or P, and X₁₁₈ is V or L,
[0832] the HC CDR1 comprises the sequence SYGIS,
[0833] the HC CDR2 comprises the sequence GIIPILATTKFAQKFQG, and
[0834] the HC CDR3 comprises the sequence GWGLRLFGEFSVWFDP;
[0835] 13) a binding molecule in which the LC CDR1 comprises the sequence RASQSVSSYLA,
[0836] the LC CDR2 comprises the sequence DASNRAT,
[0837] the LC CDR3 comprises the sequence QQRRNWPPX₁₁₉X₁₂₀T, where X₁₁₉ is V or R, and X₁₂₀ is L or I,
[0838] the HC CDR1 comprises the sequence SYAIS,
[0839] the HC CDR2 comprises the sequence GIIPIFGTANYAQKFQG, and
[0840] the HC CDR3 comprises the sequence VEGYDSSGYYLDY;
[0841] 14) a binding molecule in which the LC CDR1 comprises the sequence X₁₂₁GSX₁₂₂SNIGX₁₂₃NX₁₂₄VX₁₂₅, where X₁₂₁ is S or T, X₁₂₂ is S or R, X₁₂₃ is S or I, X₁₂₄ is T or S, and X₁₂₅ is S or N,
[0842] the LC CDR2 comprises the sequence SNNQRPS,
[0843] the LC CDR3 comprises the sequence AAWDDSLNGX₁₂₆V, where X₁₂₆ is V or Y,
[0844] the HC CDR1 comprises the sequence GYYWS,
[0845] the HC CDR2 comprises the sequence EINHSGSTNYNPSLKSG, and
[0846] the HC CDR3 comprises the sequence RYSSNWYEAWTPRGIGMDV;
[0847] 15) a binding molecule in which the LC CDR1 comprises the sequence TGSSSNIGAGYDVH or SGSSSNIGSNTVN,
[0848] the LC CDR2 comprises the sequence X₁₂₇NX₁₂₈X₁₂₉RPS, where X₁₂₇ is G or S, X₁₂₈ is S or N, and X₁₂₉ is N or Q,
[0849] the LC CDR3 comprises the sequence AAWDDSLX₁₃₀GX₁₃₁V, where X₁₃₀ is G or N, and X₁₃₁ is P or W,
[0850] the HC CDR1 comprises the sequence TYGMH,
[0851] the HC CDR2 comprises the sequence VISYDGFNKYYADSVKG, and
[0852] the HC CDR3 comprises the sequence SLGGNYYYGMDV;
[0853] 16) a binding molecule in which the LC CDR1 comprises the sequence TGTSSDIGGYNYVS or GGNNIGSKSVH,
[0854] the LC CDR2 comprises the sequence X₁₃₂X₁₃₃SKRPS, where X₁₃₂ is A or Q, and X₁₃₃ is V or D,
[0855] the LC CDR3 comprises the sequence SSYTSSSGTLNV or QAWDSSTV,
[0856] the HC CDR1 comprises the sequence TYGMH,
[0857] the HC CDR2 comprises the sequence VISYDGFNKYYADSVKG, and
[0858] the HC CDR3 comprises the sequence SLGGNYYYGMDV;
[0859] 17) a binding molecule in which the LC CDR1 comprises the sequence RASQSVSX₁₃₄X₁₃₅LA, where X₁₃₄ is S or T, and X₁₃₅ is Y or F,
[0860] the LC CDR2 comprises the sequence DASNRAT,
[0861] the LC CDR3 comprises the sequence QQRSNWPPX₁₃₆X₁₃₇T, where X₁₃₆ is A, R, K or M, and X₁₃₇ is L, I or Y,
[0862] the HC CDR1 comprises the sequence SYAIX₁₃₈, where X₁₃₈ is S or I,
[0863] the HC CDR2 comprises the sequence GIIPIFGTANYAQKFQG, and
[0864] the HC CDR3 comprises the sequence VX₁₃₉GYDX₁₄₀SGYYQX₁₄₁Y, where X₁₃₉ is T or S, X₁₄₀ is S or G, and X₁₄₁ is D or E;
[0865] 18) a binding molecule in which the LC CDR1 comprises the sequence TGTSX₁₄₂DX₁₄₃GX₁₄₄YNYVS, where X₁₄₂ is T or S, X₁₄₃ is I or V, and X₁₄₄ is R or A,
[0866] the LC CDR2 comprises the sequence DVSKRPS,
[0867] the LC CDR3 comprises the sequence SYTSSSTYA or NSYTSSSTWV,
[0868] the HC CDR1 comprises the sequence EVAIH,
[0869] the HC CDR2 comprises the sequence GFDPEDGETSYAQKFQG, and
[0870] the HC CDR3 comprises the sequence GPVLGLSKWLEFDP;
[0871] 19) a binding molecule in which the LC CDR1 comprises the sequence SGSSSNIGNNYVS,
[0872] the LC CDR2 comprises the sequence DNNKRPS,
[0873] the LC CDR3 comprises the sequence X₁₄₅X₁₄₆WDX₁₄₇SLSX₁₄₈X₁₄₉X₁₅₀, where X₁₄₅ is G or E, X₁₄₆ is T or A, X₁₄₇ is S or T, X₁₄₈ is A or D, X₁₄₉ is V or G, and X₁₅₀ is V or L,
[0874] the HC CDR1 comprises the sequence RYAMS,
[0875] the HC CDR2 comprises the sequence AISGSGGX₁₅₁TYYADSVKG, where X₁₅₁ is S or T, and
[0876] the HC CDR3 comprises the sequence GPRGQDYGDYGFLDY;
[0877] 20) a binding molecule in which the LC CDR1 comprises the sequence SGSSSNIGSNTVN,
[0878] the LC CDR2 comprises the sequence X₁₅₂NNX₁₅₃RPS, where X₁₅₂ is S, T or N, and X₁₅₃ is Q or R,
[0879] the LC CDR3 comprises the sequence AAWDDSLX₁₅₄GX₁₅₅V or AAWDDSLNGX₁₅₆VV, where X₁₅4 is N or S, X₁₅₅ is L, P, W or V, and X₁₅₆ is S or H,
[0880] the HC CDR1 comprises the sequence SX₁₅₇WIX₁₅₈, where X₁₅₇ is H or Y, and X₁₅₈ is A, V or G,
[0881] the HC CDR2 comprises the sequence X₁₅₉IYPGDSDSRYSPSFQG, where X₁₅₉ is I or T, and
[0882] the HC CDR3 comprises the sequence GPNX₁₆₀YNWFDS, where X₁₆₀ is L or I;
[0883] 21) a binding molecule in which the LC CDR1 comprises the sequence RASQX₁₆₁X₁₆₂X₁₆₃X₁₆₄X₁₆₅X₁₆₆A, where X₁₆₁ is S or G, X₁₆₂ is V or I, X₁₆₃ is S or R, X₁₆₄ is S or N, X₁₆₅ is Y, S or D, and X₁₆₆ is L or I,
[0884] the LC CDR2 comprises the sequence DX₁₆₇SX₁₆₈X₁₆₉X₁₇₀T or AASRLES, where X₁₆₇ is A or T, X₁₆₈ is N or T, X₁₆₉ is R or L, and X₁₇₀ is A or E,
[0885] the LC CDR3 comprises the sequence QQYYX₁₇₁TPX₁₇₂T, where X₁₇₁ is S or T, and X₁₇₂ is F or I,
[0886] the HC CDR1 comprises the sequence DYYIQ,
[0887] the HC CDR2 comprises the sequence WINPNSGDTNYAHKFQG, and
[0888] the HC CDR3 comprises the sequence GGSYYNVMYWFDP;
[0889] 22) a binding molecule in which the LC CDR1 comprises the sequence X₁₇₃ASQX₁₇₄ISSYLN, where X₁₇₃ is R or Q, and X₁₇₄ is S or D,
[0890] the LC CDR2 comprises the sequence X₁₇₅ASSLX₁₇₆S, where X₁₇₅ is K or A, and X₁₇₆ is E or Q,
[0891] the LC CDR3 comprises the sequence QQSYSTWT,
[0892] the HC CDR1 comprises the sequence SYAMH,
[0893] the HC CDR2 comprises the sequence VISYDGSNKYYADSVKG, and
[0894] the HC CDR3 comprises the sequence ARGGSYLYGMDV;
[0895] 23) a binding molecule in which the LC CDR1 comprises the sequence SGSX₁₇₇SNIGX₁₇₈NYVX₁₇₉, where X₁₇₇ is S or G, X₁₇₈ is N or S, and X₁₇₉ is S or H,
[0896] the LC CDR2 comprises the sequence X₁₈₀NX₁₈₁X₁₈₂RPS, where X₁₈₀ is D or R, X₁₈₁ is N or S, and X₁₈₂ is K or G,
[0897] the LC CDR3 comprises the sequence AAWDDSLX₁₈₃GWV, where X₁₈₃ is N or S,
[0898] the HC CDR1 comprises the sequence SYAIS,
[0899] the HC CDR2 comprises the sequence GIIPMFGTTNYAQKFQG, and
[0900] the HC CDR3 comprises the sequence DPTSRSTYYYYSGSYYP;
[0901] 24) a binding molecule in which the LC CDR1 comprises the sequence SGSSSNIGNNYVS or TGTRGDIGAYDGVS,
[0902] the LC CDR2 comprises the sequence DNNKRPS or AVTQRPS,
[0903] the LC CDR3 comprises the sequence AAWDDSLNGVV or SSYTSSSSWV,
[0904] the HC CDR1 comprises the sequence RYAMS,
[0905] the HC CDR2 comprises the sequence AISGSGGSTYYADSVKG, and
[0906] the HC CDR3 comprises the sequence GPRGQDYGDYGFLDY;
[0907] 25) a binding molecule in which the LC CDR1 comprises the sequence TGSSSNIGAGYDVH or SGSSSNIGNNYVS,
[0908] the LC CDR2 comprises the sequence X₁₈₄NX₁₈₅X₁₈₆RPS, where X₁₈₄ is G or D, X₁₈₅ is S or N, and X₁₈₆ is N or K,
[0909] the LC CDR3 comprises the sequence QSYDSSLSGLWV or QSYDSSLSAWV,
[0910] the HC CDR1 comprises the sequence SNYMS,
[0911] the HC CDR2 comprises the sequence VIYPGGSTFFADSVQG, and
[0912] the HC CDR3 comprises the sequence SYDFLTDYTDAFDI;
[0913] 26) a binding molecule in which the LC CDR1 comprises the sequence TGTX₁₈₇X₁₈₈DX₁₈₉GX₁₉₀YX₁₉₁X₁₉₂VS, where X₁₈₇ is S or R, X₁₈₈ is S or G, X₁₈₉ is V or I, X₁₉₀ is G or A, X₁₉₁ is N or D, and X₁₉₂ is Y or G,
[0914] the LC CDR2 comprises the sequence X₁₉₃VX₁₉₄X₁₉₅RPS, where X₁₉₃ is D or A, X₁₉₄ is S or T, and X₁₉₅ is K or Q,
[0915] the LC CDR3 comprises the sequence SSYTX₁₉₆SSX₁₉₇WV, where X₁₉₆ is T or S, and X₁₉₇ is T or S,
[0916] the HC CDR1 comprises the sequence ELSX₁₉₈H, where X₁₉₈ is I or M,
[0917] the HC CDR2 comprises the sequence GFDPEDX₁₉₉ETIYAQKFQG, where X₁₉₉ is G or A, and
[0918] the HC CDR3 comprises the sequence SPAX₂₀₀X₂₀₁X₂₀₂X₂₀₃X₂₀₄WFDP, where X₂₀₀ is V or I, X₂₀₁ is T or I, X₂₀₂ is T or R, X₂₀₃ is A or V, and X₂₀₄ is G or D;
[0919] 27) a binding molecule in which the LC CDR1 comprises the sequence SGSSSNIGX₂₀₅NX₂₀₆VX₂₀₇, where X₂₀₅ is S or N, X₂₀₆ is T or Y, and X₂₀₇ is N or S,
[0920] the LC CDR2 comprises the sequence X₂₀₈NNX₂₀₉RPS, where X₂₀₈ is S or D, and X₂₀₉ is Q or K,
[0921] the LC CDR3 comprises the sequence AAWDDSLX₂₁₀GPV, where X₂₁₀ is N or S,
[0922] the HC CDR1 comprises the sequence X₂₁₁YAMS, where X₂₁₁ is S or R,
[0923] the HC CDR2 comprises the sequence AISGSGGX₂₁₂TYYADSVKG, where X₂₁₂ is D or S, and
[0924] the HC CDR3 comprises the sequence VRYYDFWSGWDVMDV;
[0925] 28) a binding molecule in which the LC CDR1 comprises the sequence TGTSX₂₁₃DVGX₂₁₄YNX₂₁₅VS, where X₂₁₃ is T or S, X₂₁₄ is G or S, and X₂₁₅ is Y or L,
[0926] the LC CDR2 comprises the sequence DVSX₂₁₆RPS, where X₂₁₆ is K or N,
[0927] the LC CDR3 comprises the sequence SSYTSSSTLV,
[0928] the HC CDR1 comprises the sequence NYGMH,
[0929] the HC CDR2 comprises the sequence VMSYDGSNKYYADSVKG, and
[0930] the HC CDR3 comprises the sequence PDDSSGYYPDY;
[0931] 29) a binding molecule in which the LC CDR1 comprises the sequence TGTSSDVGGYNYVS,
[0932] the LC CDR2 comprises the sequence DVX₂₁₇KRPS, where X₂₁₇ is G or S,
[0933] the LC CDR3 comprises the sequence SSYTSSSTX₂₁₈V, where X₂₁₈ is W OR L,
[0934] the HC CDR1 comprises the sequence X₂₁₉YAIS, where X₂₁₉ is F or R,
[0935] the HC CDR2 comprises the sequence GIIPX₂₂₀FGX₂₂₁X₂₂₂X₂₂₃YAQX₂₂₄FQD, where X₂₂₀ is L or I, X₂₂₁ is T or K, X₂₂₂ is A or V, X₂₂₃ is K or N, and X₂₂₄ is R or K, and
[0936] the HC CDR3 comprises the sequence GGWIYRGNWFDP or GGSTWYGGNWFDP;
[0937] 30) a binding molecule in which the LC CDR1 comprises the sequence TGSSSNIGAGYDVH,
[0938] the LC CDR2 comprises the sequence GNSNRPS,
[0939] the LC CDR3 comprises the sequence QSYDSSLSGX₂₂₅WV, where X₂₂₅ is P or S,
[0940] the HC CDR1 comprises the sequence RYAIX₂₂₆, where X₂₂₆ is N or S,
[0941] the HC CDR2 comprises the sequence GIIPX₂₂₇X₂₂₈GTX₂₂₉X₂₃₀YX₂₃₁QKFQG, where X₂₂₇ is L or I, X₂₂₈ is L or F, X₂₂₉ is A or G, X₂₃₀ is D or N, and X₂₃₁ is P or A, and
[0942] the HC CDR3 comprises the sequence TLYYYDRSGNARTDDYFDH or SLYYYDRSGYPISEDYFDY;
[0943] 31) a binding molecule in which the LC CDR1 comprises the sequence TGTSSDVGX₂₃₂YNYVS, where X₂₃₂ is N or G,
[0944] the LC CDR2 comprises the sequence DVSX₂₃₃RPS, where X₂₃₃ is N or K,
[0945] the LC CDR3 comprises the sequence SSYTSSX₂₃₄TX₂₃₅V, where X₂₃₄ is G or S, and X₂₃₅ is L or Y,
[0946] the HC CDR1 comprises the sequence ELSIH,
[0947] the HC CDR2 comprises the sequence GFDPEX₂₃₆X₂₃₇ETIX₂₃₈AQX₂₃₉FQG, where X₂₃₆ is N or D, X₂₃₇ is G or A, X₂₃₈ is H or Y, and X₂₃₉ is R or K, and
[0948] the HC CDR3 comprises the sequence SX₂₄₀X₂₄₁X₂₄₂X₂₄₃X₂₄₄AX₂₄₅WFDP, where X₂₄₀ is T or P, X₂₄₁ is P or A, X₂₄₂ is M or V, X₂₄₃ is I or T, X₂₄₄ is R or T, and X₂₄₅ is S or G;
[0949] 32) a binding molecule in which the LC CDR1 comprises the sequence TGSSSNIGAGYDVH,
[0950] the LC CDR2 comprises the sequence GNSNRPS,
[0951] the LC CDR3 comprises the sequence QSYDSSLSGWV,
[0952] the HC CDR1 comprises the sequence NYGIS,
[0953] the HC CDR2 comprises the sequence X₂₄₆ISX₂₄₇X₂₄₈NGNTX₂₄₉YAQKLQG, where X₂₄₆ is G or W, X₂₄₇ is S or A, X₂₄₈ is H or Y, and X₂₄₉ is K or N, and
[0954] the HC CDR3 comprises the sequence EGGYYYGSGSYYNPRFAFDI or PRGYSGYGSNWYF;
[0955] 33) a binding molecule in which the LC CDR1 comprises the sequence RASQSVSSNLA or RASQGISNSL,
[0956] the LC CDR2 comprises the sequence X₂₅₀AX₂₅₁X₂₅₂RX₂₅₃X₂₅₄, where X₂₅₀ is W or A, X₂₅₁ is S or A, X₂₅₂ is T or S, X₂₅₃ is E or L, and X₂₅₄ is S or E,
[0957] the LC CDR3 comprises the sequence LQYFTIPWT or SQQYYSTPYT,
[0958] the HC CDR1 comprises the sequence NAWMX₂₅₅, where X₂₅₅ is S or T,
[0959] the HC CDR2 comprises the sequence RIKTKTDGGTTDYAAPVKG, and
[0960] the HC CDR3 comprises the sequence X₂₅₆SX₂₅₇PDY, where X₂₅₅ is F or H, and X₂₅₇ is T or R;
[0961] 34) a binding molecule in which the LC CDR1 comprises the sequence RASQSVSSX₂₅₈LA, where X₂₅₈ is Y or F,
[0962] the LC CDR2 comprises the sequence DASNRAT,
[0963] the LC CDR3 comprises the sequence QQYGSSPPIT or QQRSNWPPSIT,
[0964] the HC CDR1 comprises the sequence SYAIS,
[0965] the HC CDR2 comprises the sequence GIIPIFGTX₂₅₉NYAQKFQG, where X₂₅₉ is T or A, and
[0966] the HC CDR3 comprises the sequence DPTGWYSGYFDY or VGTYDSSGYSFDY;
[0967] 35) a binding molecule in which the LC CDR1 comprises the sequence GGNNIGSKSVH,
[0968] the LC CDR2 comprises the sequence YDSDRPS,
[0969] the LC CDR3 comprises the sequence QVWDSSSDHWV,
[0970] the HC CDR1 comprises the sequence DYAMS or SYYIH,
[0971] the HC CDR2 comprises the sequence VISGSGGSTSNADSVKG or FINPSDVTTYYAQKFQG, and
[0972] the HC CDR3 comprises the sequence VYCGDDCYPVVGTPGDAFDI or SRIAPTEDFFDY;
[0973] 36) a binding molecule in which the LC CDR1 comprises the sequence SSSTGAVTRGHFPN or SGSSSNIGNNYVS,
[0974] the LC CDR2 comprises the sequence STSNKHS or DNNKRPS,
[0975] the LC CDR3 comprises the sequence LLYDAGAPGWV or GAWDSSLSTPNW,
[0976] the HC CDR1 comprises the sequence SYPMH,
[0977] the HC CDR2 comprises the sequence VISYDGSLKYYVDSVKG, and
[0978] the HC CDR3 comprises the sequence DSSCSGGSCFDY;
[0979] 37) a binding molecule in which the LC CDR1 comprises the sequence SGSSSNIGSNTVN,
[0980] the LC CDR2 comprises the sequence SNNQRPS,
[0981] the LC CDR3 comprises the sequence AAWDDSLNGWV,
[0982] the HC CDR1 comprises the sequence X₂₆₀X₂₆₁AMX₂₆₂, where X₂₆₀ is S or N, X₂₆₁ is F or Y, and X₂₆₂ is H or N,
[0983] the HC CDR2 comprises the sequence X₂₆₃ISX₂₆₄X₂₆₅GX₂₆₆X₂₆₇X₂₆₈YYADSVKG, where X₂₆₃ is V or T, X₂₆₄ is F or G, X₂₆₅ is D or S, X₂₆₆ is S or G, X₂₆₇ is N or S, and X₂₆₈ is K or T, and
[0984] the HC CDR3 comprises the sequence GDYYGSGSYYNPSPFFDY or GYALNP;
[0985] 38) a binding molecule in which the LC CDR1 comprises the sequence CRASQSVSSSYLA,
[0986] the LC CDR2 comprises the sequence GASSRAT,
[0987] the LC CDR3 comprises the sequence QQYGSSPX₂₆₉T, where X₂₆₉ is Y or P,
[0988] the HC CDR1 comprises the sequence SSPMH or NYVIN,
[0989] the HC CDR2 comprises the sequence VISYDGSNKYYADSVKG or GFIPVFGIADYAQKFQG, and
[0990] the HC CDR3 comprises the sequence EIALNNYYGMDV or SGLFDWLLPRSRHRDYFDY;
[0991] 39) a binding molecule in which the LC CDR1 comprises the sequence RASQSISSYLN,
[0992] the LC CDR2 comprises the sequence AASSLQS,
[0993] the LC CDR3 comprises the sequence QQSYSTPLT,
[0994] the HC CDR1 comprises the sequence SNYMX₂₇₀, where X₂₇₀ is T or S,
[0995] the HC CDR2 comprises the sequence X₂₇₁IYPGGSTX₂₇₂X₂₇₃ADSVX₂₇₄G, where X₂₇₁ is I or V, X₂₇₂ is Y or F, X₂₇₃ is Y or F, and X₂₇₄ is K or Q, and
[0996] the HC CDR3 comprises the sequence DLPLTGTTLDY or SYDFLTDYTDAFDI;
[0997] 40) a binding molecule in which the LC CDR1 comprises the sequence RASQSISSYLN,
[0998] the LC CDR2 comprises the sequence AASSLQS,
[0999] the LC CDR3 comprises the sequence QQSYSTPX₂₇₅T, where X₂₇₅ is F or L,
[1000] the HC CDR1 comprises the sequence SX₂₇₆AX₂₇₇X₂₇₈, where X₂₇₆ is Y or S, X₂₇₇ is M or I, and X₂₇₈ is H or N,
[1001] the HC CDR2 comprises the sequence VISYDGINKYYADSVKG or GIIPIFGTVNYAQKFQG, and
[1002] the HC CDR3 comprises the sequence X₂₇₉X₂₈₀X₂₈₁X₂₈₂X₂₈₃X₂₈₄X₂₈₅YGMDV, where X₂₇₉ is A or D, X₂₈₀ is L or H, X₂₈₁ is G or I, X₂₈₂ is G or V, X₂₈₃ is N or S, X₂₈₄ is Y or P, and X₂₈₅ is Y or L;
[1003] 41) a binding molecule in which the LC CDR1 comprises the sequence TGSSSNIGAGYDVH,
[1004] the LC CDR2 comprises the sequence GNSNRPS,
[1005] the LC CDR3 comprises the sequence QSYDSSLSGPNWV or QSYDSRLRAVV,
[1006] the HC CDR1 comprises the sequence SYAIS or TQYLH,
[1007] the HC CDR2 comprises the sequence X₂₈₆IX₂₈₇PX₂₈₈X₂₈₉GX₂₉₀X₂₉₁X₂₉₂YAQKFQG, where X₂₈₆ is G or I, X₂₈₇ is I or N, X₂₈₈ is F or Y, X₂₈₉ is F or G, X₂₉₀ is T or S, X₂₉₁ is S or T, and X₂₉₂ is N or T, and
[1008] the HC CDR3 comprises the sequence GQFSDSSGYQHPYYDYGMD or SPSGYYGDYEGDAFDI;
[1009] 42) a binding molecule in which the LC CDR1 comprises the sequence TGTSSDVGGYNYVS,
[1010] the LC CDR2 comprises the sequence DVSX₂₉₃RPS, where X₂₉₃ is K or N,
[1011] the LC CDR3 comprises the sequence SSYTSSSTLV,
[1012] the HC CDR1 comprises the sequence RGDYWG or THALS,
[1013] the HC CDR2 comprises the sequence SIYHSGSTYYNPSLKS or GIIPIFGPADYAQKFQG, and
[1014] the HC CDR3 comprises the sequence HGTSGYYYPNWFDP or GLSLGFCSAGSCYDYLDY;
[1015] 43) a binding molecule in which the LC CDR1 comprises the sequence TGSSSNIGAGYDVH,
[1016] the LC CDR2 comprises the sequence GNSNRPS,
[1017] the LC CDR3 comprises the sequence QSYDSSLSGX₂₉₄V, where X₂₉₄ is V or P,
[1018] the HC CDR1 comprises the sequence DYAMH or SYDIS,
[1019] the HC CDR2 comprises the sequence GISWNSGTIGYADSVKG or GIIPILGIPNYAQKFQG, and
[1020] the HC CDR3 comprises the sequence EELGPYSNRWYSSSDGMDV or SRGYSGYGANWYFDL;
[1021] 44) a binding molecule in which the LC CDR1 comprises the sequence TGTSSDVGGYNX₂₉₅VS, where X₂₉₅ is Y or N,
[1022] the LC CDR2 comprises the sequence DVSX₂₉₆RPS, where X₂₉₆ is N or K,
[1023] the LC CDR3 comprises the sequence SSYTSSSPWV,
[1024] the HC CDR1 comprises the sequence SYAX₂₉₇S, where X₂₉₇ is M or I,
[1025] the HC CDR2 comprises the sequence GIX₂₉₈X₂₉₉X₃₀₀X₃₀₁GX₃₀₂TX₃₀₃YAX₃₀₄X₃₀₅X₃₀₆X₃₀₇G, where X₂₉₅ is S or I, X₂₉₉ is G or P, X₃₀₀ is S or M, X₃₀₁ is G or F, X₃₀₂ is S or T, X₃₀₃ is Y or N, X₃₀₄ is D or Q, X₃₀₅ is S or K, X₃₀₆ is V or F, and X₃₀₇ is K or Q, and
[1026] the HC CDR3 comprises the sequence GVVTADWYFDL or DPTSRSTYYYYSGSYYP;
[1027] 45) a binding molecule in which the LC CDR1 comprises the sequence SGSSSNIGX₃₀₈NYVS, where X₃₀₈ is R or N,
[1028] the LC CDR2 comprises the sequence DNNX₃₀₉RPS, where X₃₀₉ is R or K,
[1029] the LC CDR3 comprises the sequence GTWDSSLSAVX₃₁₀, where X₃₁₀ is A or V,
[1030] the HC CDR1 comprises the sequence SYX₃₁₁X₃₁₂X₃₁₃, where X₃₁₁ is Y or A, X₃₁₂ is M or I, and X₃₁₃ is H or I,
[1031] the HC CDR2 comprises the sequence X₃₁₄IX₃₁₅PX₃₁₆X₃₁₇GX₃₁₈X₃₁₉X₃₂₀YAQKFQG, where X₃₁₄ is I or G, X₃₁₅ is N or I, X₃₁₆ is S or I, X₃₁₇ is G or F, X₃₁₈ is S or T, X₃₁₉ is T or A, and X₃₂₀ is S or N, and
[1032] the HC CDR3 comprises the sequence GGDHGMDV or VTGYDSSGYYQDY;
[1033] 46) a binding molecule in which the LC CDR1 comprises the sequence SGSSSNIGNNYVS,
[1034] the LC CDR2 comprises the sequence DNNKRPS,
[1035] the LC CDR3 comprises the sequence GTWDSSLSAX₃₂₁V, where X₃₂₁ is G or V,
[1036] the HC CDR1 comprises the sequence SX₃₂₂X₃₂₃IX₃₂₄, where X₃₂₂ is N or Y, X₃₂₃ is W or V, and X₃₂₄ is A or S,
[1037] the HC CDR2 comprises the sequence X₃₂₅1X₃₂₆PX₃₂₇X₃₂₈X₃₂₉X₃₃₀X₃₃₁X₃₃₂X₃₃₃X₃₃₄X₃₃₅X₃₃₆FQG, where X₃₂₅ is I or R, X₃₂₆ is Y or n, X₃₂₇ is G or I, X₃₂8 is D or F, X₃₂₉ is S or G, X₃₃₀ is D or T, X₃₃₁ is T or V, X₃₃₂ is R or K, X₃₃₃ is N or Y, X₃₃₄ is S or A, X₃₃₅ is P or Q, and X₃₃₆ is S or K, and
[1038] the HC CDR3 comprises the sequence LAYFHPQRNGGYEYYFDY or DLPGDSRDGYNYDAFDI;
[1039] 47) a binding molecule in which the LC CDR1 comprises the sequence SGSSSX₃₃₇X₃₃₈GSNX₃₃₉VN, where X₃₃₇ is N or D, X₃₃₈ is V or I, and X₃₃₉ is I or T,
[1040] the LC CDR2 comprises the sequence X₃₄₀NNQRPS, where X₃₄₀ is N or S,
[1041] the LC CDR3 comprises the sequence AAWDDSLNX₃₄₁WV, where X₃₄₁ is A or G,
[1042] the HC CDR1 comprises the sequence NHWIA or NYAIN,
[1043] the HC CDR2 comprises the sequence X₃₄₂IX₃₄₃PX₃₄₄X₃₄₅X₃₄₆X₃₄₇X₃₄₈X₃₄₉YX₃₅₀X₃₅₁X₃₅₂FQG, where X₃₄₂ is I or G, X₃₄₃ is Y or I, X₃₄₄ is Y or I, X₃₄₅ is D or F, X₃₄₆ is S or G, X₃₄₇ is D or T, X₃₄₈ is T or A, X₃₄₉ is K or N, X₃₅₀ is S or A, X₃₅₁ is P or Q, and X₃₅₂ is S or K, and
[1044] the HC CDR3 comprises the sequence NPTVTNWFDS or DRYPGYYDILTGQIGTGERNAMD V;
[1045] 48) a binding molecule in which the LC CDR1 comprises the sequence SGSSSNIGX₃₅₃NYVX₃₅₄, where X₃₅₃ is N or S, and X₃₅₄ is S or Y,
[1046] the LC CDR2 comprises the sequence X₃₅₅NNX₃₅₆RPS, where X₃₅₅ is D or R, and X₃₅₆ is K or Q,
[1047] the LC CDR3 comprises the sequence X₃₅₇X₃₅₈WDX₃₅₉SLSX₃₆₀X₃₆₁X₃₆₂, where X₃₅₇ is G or A, X₃₅₈ is T or A, X₃₅₉ is S or D, X₃₆₀ is A or G, X₃₆₁ is G or W, and X₃₆₂ is P or V,
[1048] the HC CDR1 comprises the sequence TSGVGVG or ELPIH,
[1049] the HC CDR2 comprises the sequence LIDWDDNKYYTTSLKT or RFDPEDGETIYAQNFQG, and
[1050] the HC CDR3 comprises the sequence X₃₆₃X₃₆₄X₃₆₅X₃₆₆X₃₆₇X₃₆₈X₃₆₉X₃₇₀X₃₇₁X₃₇₂YYYYGMDV, where X₃₆₃ is I or D, X₃₆₄ is P or L, X₃₆₅ is G or T, X₃₆₆ is F or T, X₃₆₇ is L or V, X₃₆₈ is R or T, X₃₆₉ is Y or N, X₃₇₀ is R or P, X₃₇₁ is N or L, and X₃₇₂ is R or N; and
[1051] 49) a binding molecule in which the LC CDR1 comprises the sequence SGSSSNIGX₃₇₃NYVX₃₇₄, where X₃₇₃ is N or S, and X₃₇₄ is S or N,
[1052] the LC CDR2 comprises the sequence X₃₇₅NNX₃₇₆RPS, where X₃₇₅ is D or S, and X₃₇₆ is K or Q,
[1053] the LC CDR3 comprises the sequence X₃₇₇TWDX₃₇₈SLX₃₇₉X₃₈₀X₃₈₁V, where X₃₇₇ is G or A, X₃₇₈ is S or D, X₃₇₉ is S or N, X₃₈₀ is A or G, and X₃₈₁ is G or Q,
[1054] the HC CDR1 comprises the sequence DYX₃₈₂MX₃₈₃, where X₃₈₂ is G or W, and X₃₈₃ is H or S,
[1055] the HC CDR2 comprises the sequence X₃₈₄IX₃₈₅X₃₈₆DGSX₃₈₇KYYX₃₈₈DSVKG, where X₃₈₄ is A or N, X₃₈₅ is S or K, X₃₈₆ is Y or E, X₃₈₇ is N or E, and X₃₈₈ is A or V, and
[1056] the HC CDR3 comprises the sequence DSGLYGSGWSTYQYYAMDV or GYSGNF.

[1057] In one embodiment of the present invention, the binding molecule according to the present invention may have an IC₅₀ value of preferably 200 ng/ml or less, more preferably 100 ng/ml or less, even more preferably 50 ng/ml or less, even more preferably 25 ng/ml or less, even more preferably 10 ng/ml or less, as evaluated according to a plaque reduction neutralization test (PRNT) method for SARS-coronavirus-2 (SARS-CoV-2), without being limited thereto. Here, the IC₅₀ value refers to the antibody concentration at which the antibody exhibits 50% of neutralizing activity against the virus.

[1058] In one embodiment of the present invention, the minimum concentration value of the binding molecule according to the present invention that neutralizes 100 TCID50 of virus for SARS-coronavirus-2 (SARS-CoV-2) may be preferably 2 μg/ml or less, more preferably 1 μg/ml or less, even more preferably 0.5 μg/ml or less, even more preferably 0.25 μg/ml or less, even more preferably 0.125 μg/ml or less, without being limited thereto.

[1059] In one embodiment of the present invention, the binding molecule according to the present invention is able to bind to a receptor-binding domain (RBD) of the spike protein of SARS-coronavirus-2 with an equilibrium dissociation constant (K_{D}) of preferably 1.0×10⁻⁸M or less, more preferably 1.0×10⁻⁹M or less, even more preferably 1.0×10⁻¹⁰ M or less, without being limited thereto.

[1060] In one embodiment of the present invention, the binding molecule may be a polypeptide, particularly an antibody or an antigen-binding fragment thereof. The antibody may be a monoclonal antibody, preferably a chimeric antibody, a humanized antibody, or a human antibody, without being limited thereto. The antigen-binding fragment may be Fab, F(ab′), F(ab′)2, Fv, dAb, Fd, a single-chain antibody fragment (scFv), scFv-Fc, a complementarity-determining region (CDR) fragment, a bivalent single-chain antibody fragment, a single-chain phage antibody fragment, a diabody, a triabody, or a tetrabody, without being limited thereto.
[1061] An embodiment of the present invention provides scFv-Fc that binds to the S protein of SARS-CoV-2. Another embodiment of the present invention provides a fully human antibody (full IgG) that binds to the S protein of SARS-CoV-2.

[1062] An embodiment of the present invention provides scFv-Fc that binds to the S protein of SARS-CoV-1. Another embodiment of the present invention provides a fully human antibody (full IgG) that binds to the S protein of SARS-CoV-1.

[1063] An embodiment of the present invention provides scFv-Fc that binds to the S protein of MERS-CoV. Another embodiment of the present invention provides a fully human antibody (full IgG) that binds to the S protein of MERS-CoV.

[1064] In the present invention, the binding molecules include those that exist in the human body and those that are not present in the human body but are wholly or partially artificially produced. In particular, the binding molecule of the present invention may be one that is wholly or partially artificially produced. Wholly or partially artificially produced examples include, but are not limited to, those produced in vitro or isolated, those produced by mammalian cell culture, those artificially produced by transformed cells, or those artificially produced through shuffling recombination of genetic information of light-chain and/or heavy-chain variable regions of the antibody.

[1065] As used herein, the term “antibody” is used in the broadest sense, and particularly includes an intact monoclonal antibody, a polyclonal antibody, a multispecific antibody (e.g., a bispecific antibody) formed from two or more intact antibodies, and an antibody fragment that shows a desired biological activity. The antibody is a protein that is produced by an immune system capable of recognizing and binding to a specific antigen. Structurally, the antibody generally has a Y-shaped protein comprising four amino acid chains (two heavy chains and two light chains). Each antibody generally has two regions (a variable region and a constant region). The variable region, which is located at the ends of the arms of the Y, binds to and interacts with a target antigen. The variable region includes a complementarity-determining region (CDR) that recognizes and binds to a specific binding site on a specific antigen. The constant region, which is located at the tail of the Y, is recognized by the immune system and interacts therewith. The target antigen generally has a plurality of binding sites called epitopes, which are recognized by CDRs on antibodies. Respective antibodies that specifically bind to different epitopes have different structures. Therefore, a single antigen may have at least one antibody corresponding thereto.

[1066] Moreover, the present invention includes functional variants of the binding molecule. Binding molecules are considered to be functional variants of the binding molecule of the present invention so long as the variants are capable of competing with the binding molecule of the present invention in order to specifically bind to coronavirus or to an S protein thereof and also have neutralizing activity against coronavirus. Such functional variants include, but are not limited to, derivatives that are substantially similar in primary structural sequence, and examples thereof include in-vitro or in-vivo modifications, chemicals and/or biochemicals, that are not found in the parental monoclonal antibody of the present invention. Such modifications include, for example, acetylation, acylation, covalent attachment of a nucleotide or nucleotide derivative, covalent attachment of a lipid or lipid derivative, cross-linking, disulfide bond formation, glycosylation, hydroxylation, methylation, oxidation, pegylation, proteolytic processing, phosphorylation, and the like. Alternatively, the functional variants may be antibodies comprising an amino acid sequence containing one or more substitutions, insertions, deletions or combinations thereof of one or more amino acids compared to the amino acid sequence of the parental antibody. Furthermore, the functional variants may comprise truncated forms of the amino acid sequence at either or both the amino or carboxyl termini. The functional variants of the present invention may have the same or different, either higher or lower, binding affinities compared to the parental antibody of the present invention but are still capable of binding to coronavirus or an S protein thereof. For instance, the amino acid sequences of the variable regions, including, but not limited to, framework regions, hypervariable regions, in particular, the light-chain or heavy-chain complementarity-determining regions (CDRs), may be modified. Generally, the light chain or heavy chain variable regions comprise three hypervariable regions, comprising three CDRs, and more conserved regions, the so-called framework regions (FRs). The hypervariable regions comprise amino acid residues from CDRs and amino acid residues from hypervariable loops. Functional variants falling within the scope of the present invention may have about 50% to 99%, about 60% to 99%, about 80% to 99%, about 90% to 99%, about 95% to 99%, or about 97% to 99% amino acid sequence identity with the parental antibody defined herein. Computer algorithms such as Gap or Bestfit known to a person skilled in the art may be used to optimally align amino acid sequences to be compared and to define similar or identical amino acid residues. The functional variants may be obtained by altering the parental antibodies or parts thereof by general molecular biology methods known in the art, including PCR, oligonucleotide-directed mutagenesis, and site-directed mutagenesis, or by organic synthesis processes, without being limited thereto.

[1067] The present invention also provides an immunoconjugate in which at least one tag is additionally conjugated to the binding molecule. In one embodiment, a drug may be additionally conjugated to the binding molecule. Specifically, the binding molecule according to the present invention may be used in the form of antibody-drug conjugates comprising a drug conjugated thereto. The use of antibody-drug conjugates (ADCs), i.e. immunoconjugates, for the local delivery of drugs, allows targeted delivery of the drug moiety to infected cells, because administration of unconjugated drug agents may result in unacceptable levels of toxicity to normal cells. The maximal efficacy and minimal toxicity of ADC can be achieved by increasing the selectivity of polyclonal and monoclonal antibodies (mAbs) as well as drug-linking and drug-releasing properties.

[1068] Conventional means of attaching, i.e., linking through covalent bonds, a drug moiety to an antibody generally leads to a heterogeneous mixture of molecules where the drug moieties are attached at a number of sites on the antibody. For example, cytotoxic drugs have typically been conjugated to antibodies through the often-numerous lysine residues of an antibody, thereby generating a heterogeneous antibody-drug conjugate mixture. Depending on reaction conditions, the heterogeneous mixture typically contains a distribution of antibodies with from 0 to about 8 or more, attached to drug moieties. In addition, each subgroup of conjugates with a particular integer ratio of drug moieties to antibody is a potentially heterogeneous mixture where the drug moiety is attached at various sites on the antibody. Antibodies are large, complex and structurally diverse biomolecules, often with many reactive functional groups. Their reactivities with linker reagents and drug-linker intermediates are dependent on factors such as pH, concentration, salt concentration, and co-solvents.

[1069] Another embodiment of the present invention provides a nucleic acid molecule encoding the binding molecule.

[1070] The nucleic acid molecule of the present invention includes any nucleic acid molecule in which the amino acid sequence of the antibody provided in the present invention is translated into a polynucleotide sequence as known to those skilled in the art. Thus, various polynucleotide sequences may be produced using an ORF (open reading frame), and may also be included within the range of the nucleic acid molecule of the present invention.

[1071] Another embodiment of the present invention provides an expression vector into which the nucleic acid molecule has been inserted.

[1072] The expression vector may be any one expression vector selected from the group consisting of a MarEx vector (see Korean Patent No. 10-1076602), which is an expression vector available from Celltrion, and a commercially widely useful pCDNA vector, F, R1, RP1, Col, pBR322, ToL, and Ti vector; a cosmid; phages, such as lambda, lambdoid, M13, Mu, p1 P22, Qμ, T-even, T2, T3, T7, etc.; and plant viruses, without being limited thereto. Any expression vector known to those skilled in the art may be used in the present invention, and the expression vector may be selected depending on the properties of the host cell of interest. The introduction of the vector into the host cell may be performed by calcium phosphate transfection, viral infection, DEAE-dextran-mediated transfection, lipofectamine transfection, or electroporation, without being limited thereto, and those skilled in the art may adopt an introduction process suitable for the expression vector used and the host cell. For example, the expression vector may contain at least one selection marker, without being limited thereto, and even when a vector not containing a selection marker is used, selection is possible depending on whether or not the product is capable of being obtained. Choosing the selection marker depends on the host cell of interest, and is performed using any method known to those skilled in the art, and thus is not critical to the present invention.

[1073] In order to facilitate the purification of the binding molecule of the present invention, a tag sequence may be inserted into the expression vector and thus fused therewith. Examples of the tag include, but are not limited to, a hexa-histidine tag, a hemagglutinin tag, a myc tag or a flag tag, and any tag known to those in the art, which facilitates purification, may be used in the present invention.

[1074] The present invention also provides a cell line transformed with the expression vector. In one embodiment of the present invention, there is provided a cell line in which the expression vector is transformed into a host cell and which produces the binding molecule having ability to bind to and neutralize coronavirus.

[1075] In the present invention, the cell line may include cells of mammalian, plant, insect, fungal or cellular origin, without being limited thereto. As the mammalian cells, any one cell type selected from the group consisting of CHO cells, F2N cells, COS cells, BHK cells, Bowes melanoma cells, HeLa cells, 911 cells, HT1080 cells, A549 cells, HEK 293 cells and HEK293T cells may be used, without being limited thereto, and any cells may be used, as long as they are useful as mammalian host cells known to those skilled in the art.

[1076] The present invention also provides a composition for the diagnosis, amelioration, prevention and/or treatment of a disease caused by coronavirus, particularly SARS-coronavirus-2 (SARS-CoV-2), SARS-coronavirus-1 (SARS-CoV-1) or Middle East respiratory syndrome coronavirus (MERS-CoV), the composition comprising at least one of the binding molecule, the immunoconjugate, the nucleic acid molecule, the expression vector, and the cell line. Here, the disease caused by coronavirus may be coronavirus infection 2019 (COVID-19), severe acute respiratory syndrome, or Middle East respiratory syndrome, without being limited thereto. The above description of the binding molecule, the immunoconjugate, the nucleic acid molecule, the expression vector, and the cell line according to the present invention applies equally to the composition of the present invention. The composition of the present invention may comprise a pharmaceutically acceptable excipient, in addition to the binding molecule. As the pharmaceutically acceptable excipient, those already well known to those skilled in the art may be equally applied.

[1077] The composition of the present invention may further comprise one or more other therapeutic agents or diagnostic agents. For example, the composition of the present invention may further comprise, as an antiviral drug, interferon, an anti-S protein monoclonal antibody, an anti-S protein polyclonal antibody, a nucleoside analogue, a DNA polymerase inhibitor, a siRNA preparation, or a therapeutic vaccine, in addition to the binding molecule.

[1078] The composition comprising the binding molecule according to the present invention may be provided in the form of a formulation, such as a sterile injectable solution, a lyophilized formulation, a pre-filled syringe solution, an oral formulation, a formulation for external use, or a suppository, according to respective conventional methods, without being limited thereto.

[1079] Also, the composition comprising the binding molecule according to may be administered orally or parenterally. For example, the administration route may be intravenous administration, without being limited thereto.

[1080] The composition of the present invention may be administered to mammals including humans, thereby preventing and/or treating coronavirus infection, particularly SARS-coronavirus-2 (SARS-CoV-2), SARS-coronavirus-1 (SARS-CoV-1) or Middle East respiratory syndrome coronavirus (MERS-CoV) infection, and a disease caused by the infection. Here, the administration dose of the binding molecule (e.g. antibody) depends on a subject to be treated, the severity of disease or condition, administration rate, and the judgment of the prescribing physician, and may be, for example, 0.1 to 300 mg/kg.

[1081] The present invention also provides a kit for the diagnosis, amelioration, prevention and/or treatment of a disease caused by coronavirus, particularly SARS-coronavirus-2 (SARS-CoV-2), SARS-coronavirus-1 (SARS-CoV-1) or Middle East respiratory syndrome coronavirus (MERS-CoV), the kit comprising at least one of the binding molecule, the immunoconjugate, the nucleic acid molecule, the expression vector, and the cell line. The above description of the binding molecule, the immunoconjugate, the nucleic acid molecule, the expression vector, and the cell line according to the present invention applies equally to the kit of the present invention.

[1082] In one embodiment of the present invention, the binding molecule or the like of the present invention, which is used in the diagnostic kit, may be detectably labeled. Various methods that may be used to label biomolecules are well known to those skilled in the art and are considered to fall within the scope of the present invention. Examples of labels that may be used in the present invention include enzymes, radioisotopes, colloidal metals, fluorescent compounds, chemiluminescent compounds and bioluminescent compounds. Commonly used labels include fluorescent substances (e.g., fluorescein, rhodamine, Texas red, etc.), enzymes (e.g., horseradish peroxidase, β-galactosidase, and alkaline phosphatase), radioisotopes (e.g., 32P or 125I), biotin, digoxigenin, colloidal metals, and chemiluminescent or bioluminescent compounds (e.g., dioxetane, luminol or acridinium). Labeling methods such as covalent bonding, iodination, phosphorylation, biotinylation, etc. of enzymes or biotinyl groups are well known in the art. Detection methods include, but are not limited to, autoradiography, fluorescence microscopy, direct and indirect enzyme reactions, and the like. As commonly used detection assays, radioisotopic or non-radioisotopic assays may be applied to the present invention. These assays include, inter alia, Western blotting, overlay analysis, RIA (radioimmunoassay), IRMA (immunoradioimmunometric assay), EIA (enzyme immunoassay), ELISA (enzyme-linked immunosorbent assay), FIA (fluorescent immunoassay) and CLIA (chemiluminescent immunoassay), without being limited thereto.

[1083] The diagnostic kit of the present invention may be used to detect the presence or absence of coronaviruses, including SARS-CoV-2, SARS-CoV-1, and MERS-CoV, by bringing the binding molecule into contact with a sample and then observing the reaction. The sample may be, but is not limited to, any one selected from the group consisting of sputum, saliva, blood, sweat, lung cells, lung tissue mucus, respiratory tissue, and spit, isolated from a subject, and the sample may be prepared using a conventional method known to those skilled in the art.

[1084] Another embodiment of the present invention also provides
[1085] a kit for diagnosis, prevention or treatment of a disease caused by coronavirus, the kit comprising:
[1086] a) the binding molecule; and
[1087] b) a container.

[1088] Here, the disease caused by the coronavirus may be coronavirus infection 2019 (COVID-19), severe acute respiratory syndrome, or Middle East respiratory syndrome, without being limited thereto.

[1089] In the kit for diagnosis, amelioration, prevention and/or treatment according to the present invention, a solid carrier may be contained in the container of the kit. The antibody of the present invention may be attached to the solid carrier, and the solid carrier may be porous or non-porous, or may be planar or non-planar.

[1090] The present invention also provides a method of diagnosing, ameliorating, preventing and/or treating a disease caused by coronavirus, particularly, SARS-coronavirus-2 (SARS-CoV-2), SARS-coronavirus-1 (SARS-CoV-1) or Middle East respiratory syndrome coronavirus (MERS-CoV), the method comprising a step of administering a therapeutically effective amount of the binding molecule, immunoconjugate or composition of the present invention to either a subject having a disease caused by coronavirus, particularly, SARS-coronavirus-2 (SARS-CoV-2), SARS-coronavirus-1 (SARS-CoV-1) or Middle East respiratory syndrome coronavirus (MERS-CoV), or a subject suspected of or concerned about having the disease. Here, the disease caused by the coronavirus may be coronavirus infection 2019 (COVID-19), severe acute respiratory syndrome, or Middle East respiratory syndrome, without being limited thereto. The above description of the binding molecule, the immunoconjugate and the composition according to the present invention also applies equally to the method of the present invention. In one embodiment of the present invention, the method for diagnosis, amelioration, prevention and/or treatment may further comprise a step of administering an antiviral drug, a virus entry inhibitor or a virus adhesion inhibitor.

[1091] The present invention also provides a composition for diagnosing a disease caused by coronavirus, particularly, SARS-coronavirus-2 (SARS-CoV-2), SARS-coronavirus-1 (SARS-CoV-1) or Middle East respiratory syndrome coronavirus (MERS-CoV), the composition comprising at least one of the binding molecule, the immunoconjugate, the nucleic acid molecule, the expression vector and the cell line. Here, the disease caused by the coronavirus may be coronavirus infection 2019 (COVID-19), severe acute respiratory syndrome, or Middle East respiratory syndrome, without being limited thereto. The above description of the binding molecule, the immunoconjugate, the nucleic acid molecule, the expression vector and the cell line according to the present invention also applies equally to the composition of the present invention. The diagnostic composition of the present invention may comprise a pharmaceutically acceptable excipient, in addition to the binding molecule. As the pharmaceutically acceptable excipient, those already well known to those skilled in the art may be equally used.

[1092] The diagnostic composition of the present invention may further comprise one or more other diagnostic agents. For example, it may further comprise a binding molecule that binds to a nucleocapsid protein (N protein) on the surface of SARS-coronavirus-2 (SARS-CoV-2), in addition to the binding molecule described above.

[1093] In another embodiment of the present invention, the present invention also provides a strip for immunochromatographic analysis, the strip comprising the binding molecule that binds to a spike protein (S protein) on the surface of coronavirus. The strip for immunochromatographic analysis may further comprise a binding molecule that binds to a nucleocapsid protein (N protein) of coronavirus. The coronavirus may be any one selected from the group consisting of SARS-coronavirus-2 (SARS-CoV-2), human coronavirus 229E (HCoV-229E), human coronavirus OC43 (HCoV-OC43), severe acute respiratory syndrome coronavirus-1 (SARS-CoV-1), human coronavirus NL63 (HCoV-NL63), human coronavirus HKU1, and Middle East respiratory syndrome coronavirus (MERS-CoV), without being limited thereto.

[1094] The strip for immunochromatographic analysis may comprise:
[1095] i) a support;
[1096] ii) a sample pad configured to accommodate a sample to be analyzed and comprising a buffer inlet and a sample inlet;
[1097] iii) a conjugate pad containing a binding molecule that specifically binds to coronavirus contained in the sample introduced from the sample pad;
[1098] iv) a signal detection pad comprising a signal detection part to configured to detect whether coronavirus is present in the sample and a control part configured to check whether the sample has moved to an absorbent pad regardless of the presence or absence of an analyte (coronavirus); and
[1099] v) an absorbent pad configured to absorb the sample after completion of the signal detection reaction.

[1100] The strip may be configured such that a binding molecule that binds to a spike protein (S protein) on the surface of coronavirus is contained in each of the conjugate pad and the signal detection pad. The coronavirus S protein-binding molecule contained in the conjugate pad may be the same as or different from that contained in the signal detection pad. Also, the coronavirus S protein-binding molecule contained in each of the conjugate pad and the signal detection pad may be a binding molecule comprising the above-described sequence.

[1101] In the strip for immunochromatographic analysis, the binding molecule contained in the conjugate pad may be labeled with metal particles, latex particles, fluorescent materials, or enzymes. For example, the metal particles may be gold particles. The gold particles may be colloidal gold particles, without being limited thereto.

[1102] More specifically, the binding molecule of the present invention in the conjugate pad of the strip for immunochromatographic analysis may be detectably labeled. Various methods that may be used to label biomolecules are well known to those skilled in the art and are considered to fall within the scope of the present invention. Examples of labels that may be used in the present invention include enzymes, radioisotopes, colloidal metals, fluorescent compounds, chemiluminescent compounds and bioluminescent compounds. Commonly used labels include fluorescent substances (e.g., fluorescein, rhodamine, Texas red, etc.), enzymes (e.g., horseradish peroxidase, β-galactosidase, and alkaline phosphatase), radioisotopes (e.g., 32P or 125I), biotin, digoxigenin, colloidal metals, and chemiluminescent or bioluminescent compounds (e.g., dioxetane, luminol or acridinium). Labeling methods such as covalent bonding, iodination, phosphorylation, biotinylation, etc. of enzymes or biotinyl groups are well known in the art. Detection methods include, but are not limited to, autoradiography, fluorescence microscopy, direct and indirect enzyme reactions, and the like. As commonly used detection assays, radioisotopic or non-radioisotopic assays may be applied to the present invention. These assays include, inter alia, Western blotting, overlay analysis, RIA (radioimmunoassay), IRMA (immunoradioimmunometric assay), EIA (enzyme immunoassay), ELISA (enzyme-linked immunosorbent assay), FIA (fluorescent immunoassay) and CLIA (chemiluminescent immunoassay).

[1103] In the strip for immunochromatographic analysis, detection may be performed through visual observation, optical means, electrochemical means, or electrically conductive means, without being limited thereto.

[1104] In another embodiment of the present invention, the present invention provides a kit for diagnosing a disease caused by coronavirus, particularly SARS-coronavirus-2 (SARS-CoV-2), SARS-coronavirus-1 (SARS-CoV-1) or Middle East respiratory syndrome coronavirus (MERS-CoV), the kit comprising the strip for immunochromatographic analysis.

[1105] The diagnostic kit of the present invention may be used to detect the presence or absence of coronavirus by bringing the binding molecule into contact with a sample and then observing the reaction. The sample may be, but is not limited to, any one selected from the group consisting of sputum, saliva, blood, sweat, lung cells, lung tissue mucus, respiratory tissue, and spit, isolated from a subject, and the sample may be prepared using a conventional method known to those skilled in the art.

[1106] In another embodiment of the present invention, the present invention provides a method of detecting coronavirus, particularly SARS-coronavirus-2 (SARS-CoV-2), SARS-coronavirus-1 (SARS-CoV-1) or Middle East respiratory syndrome coronavirus (MERS-CoV), by using the diagnostic kit.

[1107] In another embodiment of the present invention, the present invention provides a method of detecting a disease caused by coronavirus, particularly SARS-coronavirus-2 (SARS-CoV-2), SARS-coronavirus-1 (SARS-CoV-1) or Middle East respiratory syndrome coronavirus (MERS-CoV), by using the diagnostic kit.

[1108] In another embodiment of the present invention, the present invention provides the use of the binding molecule for preparation of a composition for diagnosis, amelioration, prevention and/or treatment of a disease caused by coronavirus, particularly SARS-coronavirus-2 (SARS-CoV-2), SARS-coronavirus-1 (SARS-CoV-1) or Middle East respiratory syndrome coronavirus (MERS-CoV). Here, the disease caused by coronavirus may be coronavirus infection 2019 (COVID-19), severe acute respiratory syndrome, or Middle East respiratory syndrome, without being limited thereto. The above description of the binding molecule according to the present invention also applies equally to the use of the present invention.

[1109] In another embodiment of the present invention, the present invention provides the use of the composition for diagnosis, amelioration, prevention and/or treatment of a disease caused by coronavirus, particularly SARS-coronavirus-2 (SARS-CoV-2), SARS-coronavirus-1 (SARS-CoV-1) or Middle East respiratory syndrome coronavirus (MERS-CoV), the use comprising a step of administering a therapeutically effective amount of the binding molecule, immunoconjugate or composition of the present invention to either a subject having a disease caused by coronavirus, particularly, SARS-coronavirus-2 (SARS-CoV-2), SARS-coronavirus-1 (SARS-CoV-1) or Middle East respiratory syndrome coronavirus (MERS-CoV), or a subject suspected of or concerned about having the disease. Here, the disease caused by coronavirus may be coronavirus infection 2019 (COVID-19), severe acute respiratory syndrome, or Middle East respiratory syndrome, without being limited thereto. The above description of the binding molecule, the immunoconjugate or the composition according to the present invention also applies equally to the use of the present invention.

[1110] In another embodiment of the present invention, the present invention provides a method of producing a binding molecule, the method comprising steps of: introducing a nucleic acid molecule encoding the binding molecule into a host cell; culturing the host cell under conditions that allow expression of the nucleic acid molecule; and selecting the binding molecule from the cultured host cell and/or a culture of the host cell. The above description of the binding molecule according to the present invention mentioned above applies equally to the production method of the present invention.

[1111] In another embodiment of the present invention, the present invention provides a binding molecule produced according to the method for producing the binding molecule.

[1112] Hereinafter, the terms used in the present invention will be defined as follows.

[1113] As used herein, the term “binding molecule” refers to intact immunoglobulins, including monoclonal antibodies, such as chimeric, humanized or human monoclonal antibodies, or antigen-binding fragments, which are immunoglobulins that bind to antigens. For example, the term indicates a variable domain, enzyme, receptor or protein comprising an immunoglobulin fragment that competes with the intact immunoglobulin in order to bind to a spike protein on SARS-CoV-2. Regardless of the structure, an antigen-binding fragment binds to the same antigen that is recognized by the intact immunoglobulin. The antigen-binding fragment may comprise a peptide or polypeptide comprising an antibody amino acid sequence comprising 2 or more contiguous amino acid residues, 20 or more contiguous amino acid residues, 25 or more contiguous amino acid residues, 30 or more contiguous amino acid residues, 35 or more contiguous amino acid residues, 40 or more contiguous amino acid residues, 50 or more contiguous amino acid residues, 60 or more contiguous amino acid residues, 70 or more contiguous amino acid residues, 80 or more contiguous amino acid residues, 90 or more contiguous amino acid residues, 100 or more contiguous amino acid residues, 125 or more contiguous amino acid residues, 150 or more contiguous amino acid residues, 175 or more contiguous amino acid residues, 200 or more contiguous amino acid residues, or 250 or more contiguous amino acid residues.

[1114] As used herein, the term “antigen-binding fragment” includes Fab, F(ab′), F(ab′)2, Fv, dAb, Fd, a complementarity-determining region (CDR) fragment, a single-chain antibody fragment (scFv), a bivalent single-chain antibody fragment, a single-chain phage antibody fragment, a diabody, a triabody, a tetrabody, a polypeptide that contains at least one fragment of an immunoglobulin that is sufficient to confer specific antigen binding to the polypeptide, etc. The above fragment may be produced synthetically or by enzymatic or chemical cleavage of intact immunoglobulins, or may be produced using a genetic engineering method by a recombinant DNA technique. Such production methods are well known in the art.

[1115] As used herein, the term “pharmaceutically acceptable excipient” refers to any inert substance that is combined with an active molecule such as a drug, agent, or antibody for preparing an agreeable or convenient dosage form. The pharmaceutically acceptable excipient is an excipient that is non-toxic, or at least of which the toxicity is acceptable for its intended use, to recipients at the dosages and concentrations employed and is compatible with other ingredients of the formulation comprising the drug, agent or binding molecule.

[1116] As used herein, the term “therapeutically effective amount” refers to an amount of the binding molecule of the present invention that is effective for prevention or treatment before or after exposure to coronavirus. In one embodiment of the present invention, the therapeutically effective amount may be, for example, 0.1 to 300 mg/kg.

[1117] As used herein, the term “culturing” means the in vitro maintenance, differentiation, growth, proliferation and/or reproduction of cells in a medium under suitable conditions.

[1118] As used herein, the term “comprises”, “comprising”, “includes” or “including” means that it may further comprise other components in addition to the corresponding component, and is different from the term “consisting of” that excludes further comprising other additional components.

[1119] The features described herein may be used in combination, and the fact that the features are set forth in different dependent claims of the claims does not indicate that they cannot be used in combination.

### MODE FOR INVENTION

[1120] Hereinafter, the present invention will be described in detail with reference to examples. However, the following examples are merely illustrative of the content of the present invention, and the scope of the invention is not limited by the examples. Documents cited herein are incorporated herein by reference.

### Example 1: Isolation of PBMCs from Blood of Patients Who Recovered from SARS-CoV-2

[1121] Blood donors were people (Korean adults) who were confirmed to have been infected with SARS-CoV-2 in 2020 and no longer exhibited viruses as a result of treatment, and the donor selection and blood collection processes were performed under the approval of the Institutional Review Board (IRB). After donor selection, about 30 ml of whole blood was collected, and PBMCs (peripheral blood mononuclear cells) were isolated using a Ficoll-Paque™ PLUS (GE Healthcare) method. The isolated PBMCs were washed twice with a phosphate buffer solution and then adjusted to a concentration of 1×10⁷ cells/ml in a freezing medium (RPMI:FBS:DMSO=5:4:1) and stored in a liquid nitrogen tank.

### Example 2: Production of Antibody-Displayed Phage Library

[1122] Total RNA was extracted from the PBMCs (isolated in Example 1) using a TRIzol reagent (Invitrogen), and then cDNA was synthesized therefrom using a SuperScript™ III First-Strand cDNA synthesis system (Invitrogen, USA).

[1123] Production of the antibody library from the synthesized cDNA was performed with reference to the related literature (Barbas C. et. al. Phage Display: A Laboratory Manual. 2001. CSHL Press). Briefly, light-chain and heavy-chain variable regions of the antibody were amplified from the synthesized cDNA by a PCR (polymerase chain reaction) method using high-fidelity Taq polymerase (Roche) and a degenerative primer set (IDT). The isolated light-chain and heavy-chain variable-region fragments were made into an scFv gene by an overlap PCR method so as to be connected as one sequence in random combination, and the scFv gene was amplified, cleaved with restriction enzymes, and then isolated using 1% agarose gel electrophoresis and a gel extraction kit (Qiagen). A phage vector was cleaved with the same restriction enzymes, isolated, and mixed with the scFv gene, and T4 DNA ligase (New England Biolabs) was added thereto. The resulting mixture was allowed to react at 16° C. for 12 hours or more. The resulting reaction solution was mixed with ER2738 competent cells, and then transformed into the cells by an electroporation process. The transformed ER2738 cells were subjected to shaking culture, and then a VCSM13 helper phage (Agilent Technologies) was added thereto, followed by culturing for 12 hours or more.

### Example 3: Selection Using Phage Enzyme Immunoassay

[1124] The phage library culture prepared in Example 2 was centrifuged to remove the host cells, and then 4% PEG and 0.5 M NaCl were added thereto. The phage was precipitated by centrifugation and the supernatant was removed. The precipitated phage was diluted with 1% BSA/TBS to afford a phage library, and then panning was independently performed through association to and dissociation from various SARS-CoV-2 spike proteins (S1, S2, S1+S2), SARS-CoV-1 spike proteins or MERS-CoV spike proteins, thereby isolating an scFv-phage having ability to bind to SARS-CoV-2, SARS-CoV-1 or MERS-CoV spike proteins. For example, the phage library was added to an ELISA plate to which an S2 domain (residues S686 to P1213 on S protein), which is a portion of the SARS-CoV-2 S protein, was attached, followed by reaction at room temperature for 2 hours. The reaction solution was removed, and then the ELISA plate was washed with PBS containing 0.05% Tween 20. Next, the scFv-phage bound to the antigen was detached by adding 60 μl of 0.1 M glycine-HCl (pH 2.2), and neutralized using 2M Tris (pH 9.1). The neutralized scFv-phage was infected into ER2738 cells, and then incubated with helper phage, and used for subsequent panning. A portion of the infected ER2738 was spread on an LB plate before the addition of the helper phage, and a colony was obtained the next day.

[1125] The colonies, formed in each panning round, were shake-cultured in a culture medium in a 96-well deep well plate (Axygen), and when the OD₆₀₀ reached 0.7 or more, helper phage was added thereto, followed by shaking culture at 37° C. for 12 hours or more. The culture was centrifuged, the host cells were removed, and the supernatant containing the scFv-phage was collected.

[1126] The collected scFv-phage supernatant was diluted at 1:1 with 6% BSA/PBS, and then added to each well of a 96-well microtiter plate, which has been adsorbed with SARS-CoV-2 S proteins and then blocked, and each well was incubated at 37° C. for 2 hours. Each well was washed three times with PBS containing 0.05% Tween 20, and then incubated with an anti-M13 antibody labeled with HRP (horseradish peroxidase) 37° C. for 1 hour. Each well was washed three times with PBS containing 0.05% Tween 20, and then ABTS (2,2′-azinobis[3-ethylbenzothiazoline-6-sulfonic acid]-diammonium salt) was added thereto, and the absorbance at 405 nm was measured, thereby selecting scFv-phages having ability to bind to SARS-CoV-2 S antigen proteins.

### Example 4: Evaluation of Neutralizing Activity of scFv-Fc Antibody Fragment Against SARS-CoV-2

[1127] For the scFv-phages selected in Example 3, DNA was obtained through shaking culture of colonies, and then sequences for antibody variable regions were analyzed. Among them, scFv-phages, selected by excluding clones with overlapping amino acid sequences, were cloned into vectors in the form of an scFv antibody fragment (scFv-Fc) in order to evaluate the expression levels of candidate antibodies in animal cell lines. The scFv-phages were transfected into CHO cells using a transfection reagent and expressed therein, and using the culture of the cells, the 190 scFv-Fc antibody fragments were evaluated against the Korean isolate SARS-CoV-2 virus S type (betaCoV/Korea/KCDC03/2020; NCCP43326) by CPE (cytopathic effect) assay. The 190 selected antibody fractions are shown in Tables 1 and 2.

[1128] For CPE assay, each antibody sample was diluted, mixed with an equal volume of 100TCID50 virus, incubated at 37° C. for 30 minutes, and infected into the VERO.E6 cell line, and viable cells were analyzed. After 4 days of incubation in an incubator at 37° C. under 5% CO₂, the neutralizing activity of each antibody fragment was evaluated by analyzing viable cells. Two wells at one concentration were independently analyzed, and the neutralizing activity (%) of the antibody was expressed as 100% when the cells in the two wells were variable. 50% indicates a case in which the cells in only one well were viable, and 0% indicates a case in which the cells in the two wells were not viable.

[1129] As a result of the analysis, as shown in Table 3 below, antibody fragments having neutralizing activity were identified. No. in Table 3 below refers to the same binding molecule as the No. of each binding molecule shown in Tables 1 and 2 above. The positive control antibody in Table 3 below is Celltrion's CT-P59 COVID-19 neutralizing antibody (antibody No. 139 disclosed in Korean Patent No. 10-2205028).

TABLE 3

scFv-Fc dilution concentration (μg/ml)

| No. | 2 | 1 | 0.5 | 0.25 | 0.125 |
|---|---|---|---|---|---|
| 2 | 0 | 0 | 50 | 0 | 0 |
| 3 | 50 | 0 | 0 | 0 | 0 |
| 12 | 50 | 0 | 0 | 0 | 0 |
| 15 | 0 | 0 | 0 | 50 | 0 |
| 16 | 50 | 0 | 0 | 0 | 0 |
| 18 | 50 | 0 | 0 | 0 | 0 |
| 19 | 50 | 0 | 0 | 0 | 0 |
| 20 | 100 | 100 | 100 | 100 | 100 |
| 22 | 0 | 50 | 0 | 0 | 0 |
| 23 | 50 | 0 | 0 | 0 | 0 |
| 24 | 100 | 100 | 100 | 0 | 0 |
| 26 | 0 | 0 | 50 | 50 | 0 |
| 31 | 50 | 0 | 0 | 0 | 0 |
| 32 | 100 | 100 | 100 | 100 | 100 |
| 33 | 50 | 50 | 0 | 0 | 0 |
| 34 | 100 | 100 | 100 | 50 | 0 |
| 37 | 50 | 50 | 50 | 50 | 0 |
| 43 | 100 | 0 | 0 | 0 | 0 |
| 45 | 100 | 50 | 50 | 50 | 0 |
| 48 | 100 | 100 | 100 | 100 | 100 |
| 50 | 0 | 50 | 0 | 0 | 0 |
| 51 | 50 | 0 | 0 | 0 | 0 |
| 53 | 50 | 50 | 50 | 0 | 0 |
| 54 | 100 | 100 | 100 | 100 | 100 |
| 55 | 0 | 0 | 50 | 0 | 0 |
| 56 | 0 | 0 | 50 | 50 | 0 |
| 59 | 50 | 50 | 0 | 0 | 0 |
| 60 | 50 | 50 | 0 | 0 | 0 |
| 61 | 100 | 100 | 100 | 50 | 0 |
| 66 | 50 | 50 | 50 | 0 | 0 |
| 69 | 50 | 0 | 0 | 0 | 0 |
| 74 | 50 | 0 | 0 | 0 | 0 |
| 75 | 50 | 50 | 0 | 0 | 0 |
| 76 | 100 | 50 | 0 | 0 | 0 |
| 81 | 100 | 100 | 100 | 100 | 100 |
| 82 | 50 | 0 | 0 | 0 | 0 |
| 83 | 50 | 0 | 0 | 0 | 0 |
| 85 | 50 | 0 | 0 | 0 | 0 |
| 86 | 50 | 0 | 0 | 0 | 0 |
| 87 | 50 | 50 | 50 | 0 | 0 |
| 93 | 50 | 50 | 50 | 0 | 0 |
| 94 | 100 | 0 | 0 | 0 | 0 |
| 95 | 100 | 0 | 0 | 0 | 0 |
| 96 | 100 | 0 | 0 | 0 | 0 |
| 98 | 50 | 50 | 0 | 0 | 0 |
| 102 | 100 | 0 | 0 | 0 | 0 |
| 103 | 0 | 0 | 100 | 100 | 50 |
| 104 | 100 | 100 | 50 | 0 | 0 |
| 108 | 0 | 50 | 0 | 0 | 0 |
| Positive control | 100 | 100 | 100 | 100 | 100 |
| antibody | | | | | |

### Example 5: Evaluation of Binding Affinity of Antibody after Conversion into Fully Human Antibody (Full IgG)

[1130] The selected antibody fragments (scFv-Fc) confirmed to have neutralizing activity in Example 4 above were converted into fully human antibodies (full IgG), and antibody-containing cultures were prepared according to the method of Example 4. The binding affinity (equilibrium dissociation constant, K_{D}) of each fully human antibody to SARS-CoV-2 RBD was evaluated by biolayer interference (BLI) assay using Octet. As a result of analysis, it was confirmed that 11 fully human antibodies had excellent binding affinity to the SARS-CoV-2 virus surface protein (RBD) as shown in Table 4 below. No. in Table 4 below refers to the same binding molecule as the No. of each binding molecule shown in Tables 1 and 2 above.

TABLE 4

| No. | K_{D} (M) |
|---|---|
| 32 | 1.47E−10 |
| 33 | 4.31E−11 |
| 34 | 1.85E−10 |
| 37 | 5.70E−11 |
| 45 | 7.08E−11 |
| 48 | 1.84E−10 |
| 53 | 3.39E−09 |
| 54 | 3.13E−11 |
| 59 | 4.96E−11 |
| 61 | 2.26E−11 |
| 81 | 4.28E−11 |

### Example 6: Evaluation of Neutralizing Activity of Fully Human Antibody (Full IgG)

### 6-1. Evaluation (1) of Neutralizing Activity of Fully Human Antibody (Full IgG)

[1131] The 11 fully human antibodies (full IgGs) selected based on their binding affinity to the SARS-CoV-2 S (RBD) protein and their expression level in Example 5 were evaluated for neutralizing activity against the Korean isolate SARS-CoV-2 virus GR type (hCoV-19/South Korea/KUMC17/2020) using a PRNT (plaque reduction neutralization test) method.

[1132] For PRNT, each antibody sample was diluted (10 concentrations, obtained through 1/4 serial dilution from 1 ng/ml, and 11 concentrations, obtained through 1/2 serial dilution from 0.5 ng/1l), mixed with an equal volume of a virus (0.05 MOI), incubated at 37° C. for 2 hours, and then infected into VERO.E6 cells, followed by plaque assay. After incubation in a 5% CO₂ incubator at 37° C. for 60 hours, the neutralizing activity of each antibody sample was evaluated by staining with crystal violet and comparatively analyzing the number of formed plaques. The neutralizing activity (ng/ml) of each antibody is an average value obtained from the results of the neutralizing activity evaluation performed in duplicate, and was expressed as the IC₅₀ value of the antibody-treated group. Here, the IC₅₀ value is the antibody concentration at which the antibody exhibits 50% of the neutralizing activity against the virus. In Table 5 below, a lower value indicates the better neutralizing activity.

[1133] As a result of analysis, as shown in Table 5 below, fully human antibodies (full IgG) having excellent neutralizing activity were confirmed. In Table 5 below, No. refers to the same binding molecule as the No. of each binding molecule shown in Tables 1 and 2.

TABLE 5

| No. | IC₅₀ (ng/ml) |
|---|---|
| 32 | 92.17 |
| 33 | >1000 |
| 34 | 448.9 |
| 37 | 542.8 |
| 45 | 434.5 |
| 48 | 155.8 |
| 53 | 381.4 |
| 54 | 63.8 |
| 59 | >1000 |
| 61 | 798.6 |
| 81 | 669.9 |

### 6-2. Evaluation (2) of Neutralizing Activity of Fully Human Antibody (Full IgG)

[1134] 6 fully human antibodies (full IgGs), selected based on antibody characteristics such as antibody expression levels, were additionally evaluated for neutralizing activity against the SARS-CoV-2 GR type virus using a PRNT (plaque reduction neutralization test) method.

[1135] As a result of analysis, it was confirmed that the antibodies had neutralizing activity as shown in Table 6 below. In Table 6 below, No. refers to the same binding molecule as the No. of each binding molecule shown in Tables 1 and 2. The positive control antibody in Table 6 below is Celltrion's CT-P59 COVID-19 neutralizing antibody.

TABLE 6

| No. | IC₅₀ (ng/ml) |
|---|---|
| 32 | 21.1 |
| 34 | 499.4 |
| 37 | 1082.4 |
| 45 | 521.9 |
| 54 | 16.0 |
| 32 + 54 | 11.1 |
| Positive control | 2.0 |

### 6-3. Evaluation (3) of Neutralizing Activity of Fully Human Antibody (Full IgG)

[1136] Antibody No. 32, selected based on antibody characteristics such as antibody expression levels, was additionally evaluated against the Korean isolate GR type (hCoV-19/South Korea/KUMC17/2020), GH type (hCoV-19/Korea/KCDC10847/2020), the mutant virus strain from the UK (hCoV-19/South Korea/KDCA0838/2020) and the mutant virus strain from South African (hCoV-19/South Korea/KDCA0463/2020) by a PRNT (plaque reduction neutralization test) method according to the analysis method described in Example 6-1.

[1137] As a result of analysis, it was confirmed that the antibody had neutralizing activity against each virus strain as shown in Table 7 below.

TABLE 7

| Type | IC₅₀ (ng/ml) |
|---|---|
| GR | 71.1 |
| GH | 176.2 |
| Mutant virus strain from the UK | 31.73 |
| Mutant virus strain from South African | 27.62 |

### 6-4. Evaluation (4) of Neutralizing Activity of Fully Human Antibody (Full IgG)

[1138] The antibodies, selected based on antibody characteristics such as antibody expression levels, were additionally evaluated for neutralizing activity against SARS-CoV-1 and MERS-CoV viruses.

[1139] As a result of analysis, it was confirmed that the antibodies had neutralizing activity as shown in Table 8 below. In Table 8 below, No. refers to the same binding molecule as the No. of each binding molecule shown in Tables 1 and 2 above. In Table 8 below, the positive control antibody against SARS-CoV-1 is CR3022 (Xiaolong Tian et al., Emerg Microbes Infect. 2020 Feb. 17; 9(1):382-385), and the positive control antibody against MERS-CoV is Celltrion's CT-P38 MERS neutralizing antibody (antibody 5 disclosed in Table 7 of Korean Patent Application Publication No. 10-2019-0093114).

TABLE 8

| | MERS-CoV | SARS-CoV-1 |
|---|---|---|
| No. | IC₅₀ (ng/ml) | IC₅₀ (ng/ml) |
| 2 | 6682.3 | 4001.4 |
| 59 | >10000 | 6729.5 |
| 95 | 9690.8 | >10000 |
| 102 | >10000 | 2314.7 |
| 103 | 8132.8 | >10000 |
| 32 | 8377.7 | >10000 |
| CT-P59 | 8125.1 | >10000 |
| CR3022 | >10000 | 6843.6 |
| CT-P38 | 51.8 | >10000 |

### Example 6-5. Evaluation (1) of Neutralizing Activity of Fully Human Antibody (Full IgG) Against SARS-CoV-2 Mutant Pseudoviruses

[1140] A test was conducted to evaluate the neutralizing activity of a cocktail of antibody No. 32+antibody No. 54 against SARS-CoV-2 spike D614 and D614G and 20 prepared SARS-CoV-2 spike mutant pseudoviruses. Here, antibody No. 32 and antibody No. 54 respectively refer to binding molecule No. 32 and binding molecule No. 54 shown in Tables 1 and 2. The SARS-CoV-2 spike mutant pseudoviruses were prepared with reference to a portion of the epitope of the CT-P59 (Regdanvimab) antibody and the mutant viruses published in papers (A. Baum et al., Science, 2020 Aug. 21; 369(6506): 1014-1018, and Korber et al., 2020, Cell 182, 812-827). The amount of each mutant pseudovirus was fixed at 1.73×10⁷ copies, and the antibody was diluted in 10 steps of 3-fold dilutions to the highest concentration of 1,000 ng/mL. As a result of conducting a neutralization activity test using each mutant pseudovirus and each antibody dilution, it was confirmed that the antibody had neutralizing activity as shown in Table 9 below.

[1141] In Table 9 below, each mutation position was numbered from the N-terminus of the coronavirus spike protein (NCBI accession number: YP_009724390.1, SEQ ID NO: 1,521).

TABLE 9

| | SARS-CoV-2 mutant | Backbone | IC₅₀ |
|---|---|---|---|
| No. | pseudovirus | vector | (ng/mL) |
| 1 | D614 | — | 5.229 |
| 2 | S494P | D614 | 13.42 |
| 3 | R685H | D614 | 5.046 |
| 4 | S494P + R685H | D614 | 2.676 |
| 5 | E484K | D614 | 13.63 |
| 6 | Q493K | D614 | 10.15 |
| 7 | F490S | D614 | 13.25 |
| 8 | Y449N | D614 | 12.55 |
| 9 | L455F | D614 | 6.989 |
| 10 | F456L | D614 | 3.056 |
| 11 | L452R | D614 | 25.73 |
| 12 | E406Q | D614 | 15.11 |
| 13 | K444Q | D614 | 8.646 |
| 14 | V445A | D614 | 7.124 |
| 15 | N234Q | D614 | 70.01 |
| 16 | A475V | D614 | 7.35 |
| 17 | D614G | — | 6.723 |
| 18 | S477N | D614G | 4.659 |
| 19 | A222V | D614G | 6.404 |
| 20 | V1176F | D614G | 9.035 |
| 21 | N439K | D614G | 6.225 |
| 22 | Y453F | D614G | 8.515 |

### Example 6-6. Evaluation (2) of Neutralizing Activity of Fully Human Antibody (Full IgG) Against SARS-CoV-2 Mutant Pseudoviruses

[1142] A test was conducted to evaluate the neutralizing activities of antibody No. 32 and antibody No. 54 against 15 SARS-CoV-2 mutant pseudoviruses. Here, antibody No. 32 and antibody No. 54 respectively refer to binding molecule No. 32 and binding number 54 shown in Tables 1 and 2. The SARS-CoV-2 spike mutant pseudoviruses were prepared with reference to a portion of the epitope of the CT-P59 (Regdanvimab) antibody and the mutant viruses published in papers (A. Baum et al., Science, 2020 Aug. 21; 369(6506): 1014-1018, and Korber et al., 2020, Cell 182, 812-827). The amount of each mutant pseudovirus was fixed at 1.73×10⁷ copies, and the antibody was diluted in 10 steps of 3-fold dilutions to the highest concentration of 1,000 ng/mL. As a result of conducting a neutralization activity test using each mutant pseudovirus and each antibody dilution, as shown in Table 10 below, it was confirmed that the antibody had neutralizing activity.

[1143] In Table 10 below, each mutation position was numbered from the N-terminus of the coronavirus spike protein (NCBI accession number: YP_009724390.1, SEQ ID NO: 1521).

TABLE 10

| | |
|---|---|
| SARS-CoV-2 mutant | IC₅₀ (ng/ml) |

| No. | pseudovirus | No. 32 | No. 54 |
|---|---|---|---|
| 1 | D614G | 7 | 100 |
| 2 | K417N + E484K + N501Y | 10 | 2870 |
| 3 | 501Y.V2 | 60 | 2180 |
| 4 | D614G | 3.25 | 12.84 |
| 5 | K417N | 1 | 4.817 |
| 6 | E484K | 5.9 | >1000 |
| 7 | L452R | 3.39 | >1000 |
| 8 | Y449N | 2.14 | 21.9 |
| 9 | L455F | 7.52 | 8.87 |
| 10 | F456L | 2.4 | 2.15 |
| 11 | Q493K | 5.62 | 9.92 |
| 12 | S494P | 6.29 | 5.85 |
| 13 | E406Q | 3.26 | 1.71 |
| 14 | F490S | 6.08 | 12 |
| 15 | K417T | 0.91 | 7.08 |

### 6-7. Evaluation of Neutralizing Activity of Antibody No. 32

[1144] Antibody No. 32 (corresponding to No. 32 in Tables 1 and 2), which is a fully human antibody (full IgG) selected based on its binding affinity to the SARS-CoV-2 S (RBD) protein and expression level and its neutralizing activity against the wild-type SARS-CoV-2 virus, was evaluated for neutralizing activity against the mutant virus strain from South Africa (hCoV-19/South Korea/KDCA0463/2020) by a PRNT (plaque reduction neutralization test) method.

[1145] For PRNT, the antibody sample was diluted (11 concentrations obtained through 1/2 serial dilution from 1 ng/μl), mixed with an equal volume of a virus (0.05 MOI), incubated at 37° C. for 2 hours, and then infected into VERO.E6 cells, followed by plaque assay. After incubation in a 5% CO₂ incubator at 37° C. for 60 hours, the neutralizing activity of the antibody sample was evaluated by staining with crystal violet and comparatively analyzing the number of formed plaques. The neutralizing activity (ng/ml) of the antibody is an average value obtained from the results of the neutralizing activity evaluation performed in duplicate, and was expressed as the IC₅₀ value and IC₉₀ value of the antibody-treated group. Here, the IC₅₀ value is the antibody concentration at which the antibody exhibits 50% of the neutralizing activity against the virus, and the IC₉₀ value is the antibody concentration at which the antibody exhibits 90% of the neutralizing activity against the virus. In Table 11 below, a lower value indicates the better neutralizing activity.

[1146] As a result of analysis, it was confirmed that antibody No. 32 had neutralizing activity against the mutant virus strain from South Africa as shown in Table 11 below.

TABLE 11

| Antibody | IC₅₀ (ng/ml) | IC₉₀ (ng/ml) |
|---|---|---|
| No. 32 | 24.45 | 59.78 |

### 6-8. Evaluation of Neutralizing Activity of Antibody No. 32 Against SARS-CoV-2 Mutant Pseudoviruses

[1147] A test was conducted to evaluate the neutralizing activities of antibody No. 32 against SARS-CoV-2 spike D614 and 50 prepared SARS-CoV-2 spike mutant pseudoviruses. The SARS-CoV-2 spike mutant pseudoviruses were prepared with reference to a portion of the epitope of the CT-P59 (Regdanvimab) antibody and the mutant viruses published in papers (A. Baum et al., Science, 2020 Aug. 21; 369(6506):1014-1018., Korber et al., 2020, Cell 182, 812-827., and Wang et al., 2021, doi: 10.1038/s41586-021-03398-2.). The amount of each mutant pseudovirus was fixed at 1.73×10⁷ copies, and the antibody was diluted in 10 steps of 3-fold dilutions to the highest concentration of 100 ng/mL. As a result of conducting a neutralization activity test using each mutant pseudovirus and each antibody dilution, it was confirmed that the antibody had neutralizing activity as shown in Table 12 below.

[1148] In Table 12 below, each mutation position was numbered from the N-terminus of the coronavirus spike protein (NCBI accession number: YP_009724390.1, SEQ ID NO: 1,521). In addition, the position of each mutation in UK mutant virus strain 501Y.V1 (B.1.1.7), South Africa mutant virus strain 501Y.V2 (B.1.351), Brazil mutant virus strain 501Y.V3 (P.1), California mutant virus strain (B.1.429), New York mutant virus strain (B.1.525) and New York mutant virus strain (B.1.526) is shown in Reference Table A below.

TABLE 12

| | SARS-CoV-2 mutant | Backbone | |
|---|---|---|---|
| No. | pseudovirus | vector | IC₅₀ (ng/ml) |
| 1 | D614 | — | 4.342 |
| 2 | D614G | — | 4.113 |
| 3 | Q493R | D614G | 4.941 |
| 4 | K417E | D614G | 1.133 |
| 5 | G446V | D614G | 5.019 |
| 6 | G476S | D614G | 6.036 |
| 7 | F486V | D614G | 4.222 |
| 8 | E406W | D614G | 7.836 |
| 9 | N440D | D614G | 4.238 |
| 10 | P681H | D614G | 3.011 |
| 11 | K417N | D614G | 1.344 |
| 12 | A701V | D614G | 4.139 |
| 13 | D80A | D614G | 2.657 |
| 14 | K417N + E484K + N501Y | D614G | 2.71 |
| 15 | Q493M | D614G | 4.785 |
| 16 | F486I | D614G | 3.18 |
| 17 | Y489H | D614G | 8.358 |
| 18 | N501Y | D614G | 4.838 |
| 19 | HV69-70 del | D614G | 4.156 |
| 20 | HV69-70del + N501Y | D614G | 4.633 |
| 21 | N501T | D614G | 5.959 |
| 22 | N501F | D614G | 5.952 |
| 23 | Q677H | D614G | 4.84 |
| 24 | Q498H | D614G | 2.558 |
| 25 | N460T | D614G | 16.71 |
| 26 | F486S | D614G | 2.275 |
| 27 | F486L | D614G | 2.366 |
| 28 | T478K | D614G | 2.575 |
| 29 | K417T | D614G | 0.977 |
| 30 | Q493Y | D614G | 1.124 |
| 31 | Q493A | D614G | 5.745 |
| 32 | A372V | D614G | 2.441 |
| 33 | P384L | D614G | 4.404 |
| 34 | S494L | D614G | 4.638 |
| 35 | 501Y.V3 (P.1) | D614G | 1.71 |
| 36 | 501Y.V2 (B.1.351) | D614G | 3.272 |
| 37 | B.1.526 | D614G | 3.53 |
| 38 | E484Q + L452R + P681R | D614G | 8.264 |
| 39 | UK (B.1.1.7) | D614G | 5.413 |
| 40 | California (B.1.429) | D614G | 6.723 |
| 41 | New York (B.1.525) | D614G | 5.569 |
| 42 | S477R | D614G | 8.772 |
| 43 | D420N | D614G | — |
| 44 | Y473F | D614G | 5.248 |
| 45 | S494Q | D614G | 2.756 |
| 46 | E484G | D614G | 3.556 |
| 47 | S477N | D614G | 4.561 |
| 48 | S494P | D614G | 6.49 |
| 49 | Y453F | D614G | 4.422 |
| 50 | N439K | D614G | 5.352 |
| 51 | A222V | D614G | 4.721 |
| 52 | N234Q | D614G | 14.41 |

(Reference Table A)

| UK | HV | Y144del | | | N501Y | D614G | T716I | | S982A | D1118H |
|---|---|---|---|---|---|---|---|---|---|---|
| 501Y.V1 | 69- | | | | | | | | | |
| (B.1.1.7) | 70del | | | | | | | | | |
| | | | | | A570D | P681H | | | | |
| South | L18F | | D215G | K417N | N501Y | D614G | A701V | | | |
| Africa | D80A | LAL 242-244del | | E484K | | | | | | |
| 501Y.V2 | | | | | | | | | | |
| (B.1.351) | | | | | | | | | | |
| Brazil | L18F | D138Y | | K417T | N501Y | D614G | | | | T1027I |
| 501Y.V3 | T20N | R190S | | E484K | | H655Y | | | | V1176F |
| (P.1) | P26S | | | | | | | | | |
| California | S13I | W152C | | L452R | | D614G | | | | |
| (B.1.429) | | | | | | | | | | |
| | A67V | Y144del | | E484K | | D614G | | F888L | | |
| New York | HV | | | | | Q677H | | | | |
| (B.1.525) | 69- | | | | | | | | | |
| | 70del | | | | | | | | | |
| New York | L5F | D253G | | E484K | | D614G | A701V | | | |
| (B.1.526) | T95I | | | | | | | | | |

6-9. Evaluation of Neutralizing Activity of Antibody No. 32 Against SARS-CoV-2 Mutant Viruses from US and South Africa

[1149] Antibody No. 32, selected based on antibody characteristics such as antibody expression level, was additionally evaluated against the mutant virus strains from California, USA ((hCoV-19/Korea/KDCA49671/2021 (B.1.427) and hCoV-19/Korea/KDCA59777/2021 (B.1.429) and the mutant virus strain from South Africa (hCoV-19/South Korea/KDCA0463/2020, B.1.351) by a PRNT (plaque reduction neutralization test) method as described above. As a result, it was confirmed that the antibody had neutralizing activity as shown in Table 13 below.

TABLE 13

| No. | Mutant virus | IC₅₀ (ng/ml) |
|---|---|---|
| 1 | (B.1.427) from California, USA | 58.48 |
| 2 | (B.1.429) from California, USA | 34.28 |
| 3 | Mutant strain (B.1.351) from South Africa | 20.58 |

6-10. Evaluation of Neutralizing Activity of Antibody No. 32 Against SARS-CoV-2 Mutant Viruses from New York and Nigeria

[1150] Antibody No. 32, selected based on antibody characteristics such as antibody expression level, was additionally evaluated against the Korean isolate GR type (B.1.1.119) as a control, the mutant virus strain from New York, USA (hCoV-19/Korea/KDCA82438/2021, B.1.526), and the mutant virus strain (B.1.525) from UK/Nigeria by a PRNT (plaque reduction neutralization test) method as described above. As a result, it was confirmed that the antibody had neutralizing activity as shown in Table 14 below.

TABLE 14

| No. | Mutant virus | IC₅₀ (ng/ml) |
|---|---|---|
| 1 | (B.1.526) from New York, USA | 44.44 |
| 2 | (B.1.525) from UK/Nigeria | 14.53 |
| 3 | GR (B.1.1.119) | 50.5 |

6-11. Evaluation of Neutralizing Activity of Antibody No. 32 Against SARS-CoV-2 Mutant Virus (P.1) from Brazil

[1151] Antibody No. 32, selected based on antibody characteristics such as antibody expression level, was additionally evaluated against the mutant virus strain (P.1) from Brazil by a PRNT (plaque reduction neutralization test) method as described above. As a result of analysis, it was confirmed that the antibody had neutralizing activity as shown in Table 15 below.

TABLE 15

| No. | Mutant virus | IC₅₀ (ng/ml) |
|---|---|---|
| 1 | (P.1) from Brazil | 7.21 |

6-12. Evaluation of Neutralizing Activity of Antibody No. 32 Against SARS-CoV-2 Mutant Viruses (B.1.617.1, and B.1.617.2) from India

[1152] Antibody No. 32, selected based on antibody characteristics such as antibody expression level, was additionally evaluated against the mutant virus strains (hCoV-19/Korea/KDCA2950/2021 (B.1.617.1), and hCoV-19/Korea/19861/KDCA/2021 (B.1.617.2)) from India by a PRNT (plaque reduction neutralization test) method as described above. As a result of analysis, it was confirmed that the antibody had neutralizing activity as shown in Table 16 below.

TABLE 16

| No. | Mutant virus | IC₅₀ (ng/ml) |
|---|---|---|
| 1 | (B.1.617.1) from India | 25.84 |
| 2 | (B.1.617.2) from India | 18.88 |

### Example 7. Evaluation of Binding Affinity and Mechanism of Action of Fully Human Antibody (Full IgG)

[1153] The binding affinity (antibody No. 32 and No. 54) and mechanism of action (antibody No. 32) of the antibodies (full IgG), selected in Examples 5 and 6, to SARS-CoV-2 RBD mutant proteins, were evaluated by performing Octet analysis.

[1154] SARS-CoV-2 virus can initiate infection of human cells by binding of the surface protein (RBD) thereof to the human receptor (ACE2). Thus, the mechanism of action of antibody No. 32 (full IgG) was evaluated by performing biolayer interference (BLI) assay using Octet. As a result of analysis, it was confirmed that the antibodies had excellent binding affinity even to mutant proteins of the SARS-CoV-2 virus surface protein (RBD) as shown in Table 17 below, and that the binding of the SARS-CoV-2 virus surface protein (RBD) to the human receptor (ACE2) was completely inhibited by antibody No. 32 (full IgG) as shown in FIG. 1.

TABLE 17

| No. | RBD type | K_{D} (M) | kon (1/Ms) | kdis (1/s) |
|---|---|---|---|---|
| 32 | | 3.05E−10 | 6.33E+05 | 1.93E−04 |
| 54 | WT | 1.33E−10 | 8.15E+05 | 1.08E−04 |
| 32 | | 1.61E−10 | 5.48E+05 | 8.82E−05 |
| 54 | S494P | 1.84E−11 | 8.22E+05 | 1.51E−05 |
| 32 | | 3.13E−10 | 4.74E+05 | 1.48E−04 |
| 54 | K417N | 6.63E−11 | 1.06E+06 | 7.04E−05 |
| 32 | | 2.90E−10 | 6.63E+05 | 1.92E−04 |
| 54 | E484K | 1.73E−09 | 2.32E+05 | 4.01E−04 |
| 32 | | 3.79E−10 | 4.72E+05 | 1.79E−04 |
| 54 | N501Y | 1.18E−10 | 8.13E+05 | 9.56E−05 |
| 32 + 54 | WT | 2.74E−10 | 3.72E+05 | 1.02E−04 |
| 32 + 54 | S494P | 1.99E−10 | 4.14E+05 | 8.22E−05 |
| 32 + 54 | K417N | 1.60E−10 | 4.62E+05 | 7.39E−05 |
| 32 + 54 | E484K | 6.90E−10 | 2.48E+05 | 1.71E−04 |
| 32 + 54 | N501Y | 2.35E−10 | 4.13E+05 | 9.68E−05 |

### Example 8. Evaluation of Neutralizing Activity of Fully Human Antibody (Full IgG) Against SARS-CoV-2 Virus Through Animal Experiment

### 8-1. Experiment for Evaluation of Preventive Efficacy in Mice

[1155] Using TG mice (B6.Cg-Tg(K18-ACE2)2Prlmn/J [Stock No: 034860 K18-hACE2] from The Jackson Laboratory) as an animal model that is naturally infected with SARS-CoV-2 virus and shows clinical symptoms and lesions similar to those in humans, an experiment was conducted as follows in order to evaluate the in-vivo preventive efficacy of antibody No. 32 and No. 54.

[1156] Mice were divided into a total of 10 groups, including a non-infected group, an infected group, and administered groups (1 mg/kg or 10 mg/kg CT-P59, 1 mg/kg or 10 mg/kg antibody No. 32, 1 mg/kg or 10 mg/kg antibody No. 54, and 1 mg/kg or 10 mg/kg antibody No. 32+antibody No. 54 cocktail). The non-infected group consisted of 3 mice, and the infected group and the administered groups consisted of 6 mice per group. 24 hours after administration of DPBS or 1 mg/kg or 10 mg/kg of each antibody to each group, 1×10⁵ PFU/50 μL of SARS-CoV-2 virus (NMC-nCoV02) was inoculated into the nasal cavity, and observation was performed for a maximum of 6 days. Additionally, the body weight of each mouse in each group was evaluated before viral inoculation and daily for 6 days after viral inoculation. In order to measure the virus titer in the tissue, the mice were sacrificed on days 3 and 6 after viral inoculation, and the lung tissue and nasal lavage fluid were obtained therefrom. The virus titer of each tissue was measured through plaque assay using Vero cells.

[1157] As a result, antibody No. 32 (1 and 10 mg/kg) and antibody No. 54 (10 mg/kg) showed non-inferiority in terms of body weight change compared to CT-P59. A low dose (1 mg/kg) of antibody No. 54 showed significantly lower results in terms of body weight change compared to CT-P59 and antibody No. 32 (FIG. 2a).

[1158] The results of measuring the virus titer in the lungs by plaque assay are as follows. A high dose (10 mg/kg) of antibody No. 32 antibody and a high dose (10 mg/kg) of the cocktail of antibody No. 32 and antibody No. 54 showed the best preventive efficacy because the virus was not detected from day 3. On day 6, all of the antibody-administered groups showed preventive efficacy (FIG. 2b).

[1159] In addition, the results of measuring the viral titer in the nasal lavage fluid by plaque assay are as follows. On day 3, there was no difference in preventive efficacy between the low-dose (1 mg/kg) groups. Only the antibody No. 32+antibody No. 54 cocktail group showed the best preventive efficacy in comparison between the low-dose (1 mg/kg) groups because the virus was not detected on day 6. The high dose (10 mg/kg) showed preventive efficacy on day 6 in all of the administered groups (FIG. 2c).

1. A neutralizing binding molecule that binds to a spike protein (S protein) on a surface of coronavirus, wherein the binding molecule is any one selected from the group consisting of the following binding molecules 1) to 49):
1) a binding molecule comprising a) a light-chain variable region comprising a CDR1 region of SEQ ID NO: 7, a CDR2 region of SEQ ID NO: 8, and a CDR3 region of SEQ ID NO: 9, and b) a heavy-chain variable region comprising a CDR1 region of SEQ ID NO: 10, a CDR2 region of SEQ ID NO: 11, and a CDR3 region of SEQ ID NO: 12;
2) a binding molecule comprising a) a light-chain variable region comprising a CDR1 region of SEQ ID NO: 13, a CDR2 region of SEQ ID NO: 14, and a CDR3 region of SEQ ID NO: 15, and b) a heavy-chain variable region comprising a CDR1 region of SEQ ID NO: 16, a CDR2 region of SEQ ID NO: 17, and a CDR3 region of SEQ ID NO: 18;
3) a binding molecule comprising a) a light-chain variable region comprising a CDR1 region of SEQ ID NO: 67, a CDR2 region of SEQ ID NO: 68, and a CDR3 region of SEQ ID NO: 69, and b) a heavy-chain variable region comprising a CDR1 region of SEQ ID NO: 70, a CDR2 region of SEQ ID NO: 71, and a CDR3 region of SEQ ID NO: 72;
4) a binding molecule comprising a) a light-chain variable region comprising a CDR1 region of SEQ ID NO: 85, a CDR2 region of SEQ ID NO: 86, and a CDR3 region of SEQ ID NO: 87, and b) a heavy-chain variable region comprising a CDR1 region of SEQ ID NO: 88, a CDR2 region of SEQ ID NO: 89, and a CDR3 region of SEQ ID NO: 90;
5) a binding molecule comprising a) a light-chain variable region comprising a CDR1 region of SEQ ID NO: 91, a CDR2 region of SEQ ID NO: 92, and a CDR3 region of SEQ ID NO: 93, and b) a heavy-chain variable region comprising a CDR1 region of SEQ ID NO: 94, a CDR2 region of SEQ ID NO: 95, and a CDR3 region of SEQ ID NO: 96;
6) a binding molecule comprising a) a light-chain variable region comprising a CDR1 region of SEQ ID NO: 103, a CDR2 region of SEQ ID NO: 104, and a CDR3 region of SEQ ID NO: 105, and b) a heavy-chain variable region comprising a CDR1 region of SEQ ID NO: 106, a CDR2 region of SEQ ID NO: 107, and a CDR3 region of SEQ ID NO: 108;
7) a binding molecule comprising a) a light-chain variable region comprising a CDR1 region of SEQ ID NO: 109, CDR2 region of SEQ ID NO: 110, and CDR3 region of SEQ ID NO: 111, and b) a heavy-chain variable region comprising a CDR1 region of SEQ ID NO: 112, a CDR2 region of SEQ ID NO: 113, and a CDR3 region of SEQ ID NO: 114;
8) a binding molecule comprising a) a light-chain variable region comprising a CDR1 region of SEQ ID NO: 115, a CDR2 region of SEQ ID NO: 116, and a CDR3 region of SEQ ID NO: 117, and b) a heavy-chain variable region comprising a CDR1 region of SEQ ID NO: 118, a CDR2 region of SEQ ID NO: 119, and a CDR3 region of SEQ ID NO: 120;
9) a binding molecule comprising a) a light-chain variable region comprising a CDR1 region of SEQ ID NO: 127, a CDR2 region of SEQ ID NO: 128, and a CDR3 region of SEQ ID NO: 129, and b) a heavy-chain variable region comprising a CDR1 region of SEQ ID NO: 130, a CDR2 region of SEQ ID NO: 131, and a CDR3 region of SEQ ID NO: 132;
10) a binding molecule comprising a) a light-chain variable region comprising a CDR1 region of SEQ ID NO: 133, a CDR2 region of SEQ ID NO: 134, and a CDR3 region of SEQ ID NO: 135, and b) a heavy-chain variable region comprising a CDR1 region of SEQ ID NO: 136, a CDR2 region of SEQ ID NO: 137, and a CDR3 region of SEQ ID NO: 138;
11) a binding molecule comprising a) a light-chain variable region comprising a CDR1 region of SEQ ID NO: 139, a CDR2 region of SEQ ID NO: 140, and a CDR3 region of SEQ ID NO: 141, and b) a heavy-chain variable region comprising a CDR1 region of SEQ ID NO: 142, a CDR2 region of SEQ ID NO: 143, and a CDR3 region of SEQ ID NO: 144;
12) a binding molecule comprising a) a light-chain variable region comprising a CDR1 region of SEQ ID NO: 151, a CDR2 region of SEQ ID NO: 152, and a CDR3 region of SEQ ID NO: 153, and b) a heavy-chain variable region comprising a CDR1 region of SEQ ID NO: 154, a CDR2 region of SEQ ID NO: 155, and a CDR3 region of SEQ ID NO: 156;
13) a binding molecule comprising a) a light-chain variable region comprising a CDR1 region of SEQ ID NO: 181, a CDR2 region of SEQ ID NO: 182, and a CDR3 region of SEQ ID NO: 183, and b) a heavy-chain variable region comprising a CDR1 region of SEQ ID NO: 184, a CDR2 region of SEQ ID NO: 185, and a CDR3 region of SEQ ID NO: 186;
14) a binding molecule comprising a) a light-chain variable region comprising a CDR1 region of SEQ ID NO: 187, a CDR2 region of SEQ ID NO: 188, and a CDR3 region of SEQ ID NO: 189, and b) a heavy-chain variable region comprising a CDR1 region of SEQ ID NO: 190, a CDR2 region of SEQ ID NO: 191, and a CDR3 region of SEQ ID NO: 192;
15) a binding molecule comprising a) a light-chain variable region comprising a CDR1 region of SEQ ID NO: 193, a CDR2 region of SEQ ID NO: 194, and a CDR3 region of SEQ ID NO: 195, and b) a heavy-chain variable region comprising a CDR1 region of SEQ ID NO: 196, a CDR2 region of SEQ ID NO: 197, and a CDR3 region of SEQ ID NO: 198;
16) a binding molecule comprising a) a light-chain variable region comprising a CDR1 region of SEQ ID NO: 199, a CDR2 region of SEQ ID NO: 200, and a CDR3 region of SEQ ID NO: 201, and b) a heavy-chain variable region comprising a CDR1 region of SEQ ID NO: 202, a CDR2 region of SEQ ID NO: 203, and a CDR3 region of SEQ ID NO: 204;
17) a binding molecule comprising a) a light-chain variable region comprising a CDR1 region of SEQ ID NO: 217, a CDR2 region of SEQ ID NO: 218, and a CDR3 region of SEQ ID NO: 219, and b) a heavy-chain variable region comprising a CDR1 region of SEQ ID NO: 220, a CDR2 region of SEQ ID NO: 221, and a CDR3 region of SEQ ID NO: 222;
18) a binding molecule comprising a) a light-chain variable region comprising a CDR1 region of SEQ ID NO: 253, a CDR2 region of SEQ ID NO: 254, and a CDR3 region of SEQ ID NO: 255, and b) a heavy-chain variable region comprising a CDR1 region of SEQ ID NO: 256, a CDR2 region of SEQ ID NO: 257, and a CDR3 region of SEQ ID NO: 258;
19) a binding molecule comprising a) a light-chain variable region comprising a CDR1 region of SEQ ID NO: 265, a CDR2 region of SEQ ID NO: 266, and a CDR3 region of SEQ ID NO: 267, and b) a heavy-chain variable region comprising a CDR1 region of SEQ ID NO: 268, a CDR2 region of SEQ ID NO: 269, and a CDR3 region of SEQ ID NO: 270;
20) a binding molecule comprising a) a light-chain variable region comprising a CDR1 region of SEQ ID NO: 283, a CDR2 region of SEQ ID NO: 284, and a CDR3 region of SEQ ID NO: 285, and b) a heavy-chain variable region comprising a CDR1 region of SEQ ID NO: 286, a CDR2 region of SEQ ID NO: 287, and a CDR3 region of SEQ ID NO: 288;
21) a binding molecule comprising a) a light-chain variable region comprising a CDR1 region of SEQ ID NO: 295, a CDR2 region of SEQ ID NO: 296, and a CDR3 region of SEQ ID NO: 297, and b) a heavy-chain variable region comprising a CDR1 region of SEQ ID NO: 298, a CDR2 region of SEQ ID NO: 299, and a CDR3 region of SEQ ID NO: 300;
22) a binding molecule comprising a) a light-chain variable region comprising a CDR1 region of SEQ ID NO: 301, a CDR2 region of SEQ ID NO: 302, and a CDR3 region of SEQ ID NO: 303, and b) a heavy-chain variable region comprising a CDR1 region of SEQ ID NO: 304, a CDR2 region of SEQ ID NO: 305, and a CDR3 region of SEQ ID NO: 306;
23) a binding molecule comprising a) a light-chain variable region comprising a CDR1 region of SEQ ID NO: 313, a CDR2 region of SEQ ID NO: 314, and a CDR3 region of SEQ ID NO: 315, and b) a heavy-chain variable region comprising a CDR1 region of SEQ ID NO: 316, a CDR2 region of SEQ ID NO: 317, and a CDR3 region of SEQ ID NO: 318;
24) a binding molecule comprising a) a light-chain variable region comprising a CDR1 region of SEQ ID NO: 319, a CDR2 region of SEQ ID NO: 320, and a CDR3 region of SEQ ID NO: 321, and b) a heavy-chain variable region comprising a CDR1 region of SEQ ID NO: 322, a CDR2 region of SEQ ID NO: 323, and a CDR3 region of SEQ ID NO: 324;
25) a binding molecule comprising a) a light-chain variable region comprising a CDR1 region of SEQ ID NO: 325, a CDR2 region of SEQ ID NO: 326, and a CDR3 region of SEQ ID NO: 327, and b) a heavy-chain variable region comprising a CDR1 region of SEQ ID NO: 328, a CDR2 region of SEQ ID NO: 329, and a CDR3 region of SEQ ID NO: 330;
26) a binding molecule comprising a) a light-chain variable region comprising a CDR1 region of SEQ ID NO: 331, a CDR2 region of SEQ ID NO: 332, and a CDR3 region of SEQ ID NO: 333, and b) a heavy-chain variable region comprising a CDR1 region of SEQ ID NO: 334, a CDR2 region of SEQ ID NO: 335, and a CDR3 region of SEQ ID NO: 336;
27) a binding molecule comprising a) a light-chain variable region comprising a CDR1 region of SEQ ID NO: 349, a CDR2 region of SEQ ID NO: 350, and a CDR3 region of SEQ ID NO: 351, and b) a heavy-chain variable region comprising a CDR1 region of SEQ ID NO: 352, a CDR2 region of SEQ ID NO: 353, and a CDR3 region of SEQ ID NO: 354;
28) a binding molecule comprising a) a light-chain variable region comprising a CDR1 region of SEQ ID NO: 355, a CDR2 region of SEQ ID NO: 356, and a CDR3 region of SEQ ID NO: 357, and b) a heavy-chain variable region comprising a CDR1 region of SEQ ID NO: 358, a CDR2 region of SEQ ID NO: 359, and a CDR3 region of SEQ ID NO: 360;
29) a binding molecule comprising a) a light-chain variable region comprising a CDR1 region of SEQ ID NO: 361, a CDR2 region of SEQ ID NO: 362, and a CDR3 region of SEQ ID NO: 363, and b) a heavy-chain variable region comprising a CDR1 region of SEQ ID NO: 364, a CDR2 region of SEQ ID NO: 365, and a CDR3 region of SEQ ID NO: 366;
30) a binding molecule comprising a) a light-chain variable region comprising a CDR1 region of SEQ ID NO: 391, a CDR2 region of SEQ ID NO: 392, and a CDR3 region of SEQ ID NO: 393, and b) a heavy-chain variable region comprising a CDR1 region of SEQ ID NO: 394, a CDR2 region of SEQ ID NO: 395, and a CDR3 region of SEQ ID NO: 396;
31) a binding molecule comprising a) a light-chain variable region comprising a CDR1 region of SEQ ID NO: 409, a CDR2 region of SEQ ID NO: 410, and a CDR3 region of SEQ ID NO: 411, and b) a heavy-chain variable region comprising a CDR1 region of SEQ ID NO: 412, a CDR2 region of SEQ ID NO: 413, and a CDR3 region of SEQ ID NO: 414;
32) a binding molecule comprising a) a light-chain variable region comprising a CDR1 region of SEQ ID NO: 439, a CDR2 region of SEQ ID NO: 440, and a CDR3 region of SEQ ID NO: 441, and b) a heavy-chain variable region comprising a CDR1 region of SEQ ID NO: 442, a CDR2 region of SEQ ID NO: 443, and a CDR3 region of SEQ ID NO: 444;
33) a binding molecule comprising a) a light-chain variable region comprising a CDR1 region of SEQ ID NO: 445, a CDR2 region of SEQ ID NO: 446, and a CDR3 region of SEQ ID NO: 447, and b) a heavy-chain variable region comprising a CDR1 region of SEQ ID NO: 448, a CDR2 region of SEQ ID NO: 449, and a CDR3 region of SEQ ID NO: 450;
34) a binding molecule comprising a) a light-chain variable region comprising a CDR1 region of SEQ ID NO: 451, a CDR2 region of SEQ ID NO: 452, and a CDR3 region of SEQ ID NO: 453, and b) a heavy-chain variable region comprising a CDR1 region of SEQ ID NO: 454, a CDR2 region of SEQ ID NO: 455, and a CDR3 region of SEQ ID NO: 456;
35) a binding molecule comprising a) a light-chain variable region comprising a CDR1 region of SEQ ID NO: 481, a CDR2 region of SEQ ID NO: 482, and a CDR3 region of SEQ ID NO: 483, and b) a heavy-chain variable region comprising a CDR1 region of SEQ ID NO: 484, a CDR2 region of SEQ ID NO: 485, and a CDR3 region of SEQ ID NO: 486;
36) a binding molecule comprising a) a light-chain variable region comprising a CDR1 region of SEQ ID NO: 487, a CDR2 region of SEQ ID NO: 488, and a CDR3 region of SEQ ID NO: 489, and b) a heavy-chain variable region comprising a CDR1 region of SEQ ID NO: 490, a CDR2 region of SEQ ID NO: 491, and a CDR3 region of SEQ ID NO: 492;
37) a binding molecule comprising a) a light-chain variable region comprising a CDR1 region of SEQ ID NO: 493, a CDR2 region of SEQ ID NO: 494, and a CDR3 region of SEQ ID NO: 495, and b) a heavy-chain variable region comprising a CDR1 region of SEQ ID NO: 496, a CDR2 region of SEQ ID NO: 497, and a CDR3 region of SEQ ID NO: 498;
38) a binding molecule comprising a) a light-chain variable region comprising a CDR1 region of SEQ ID NO: 505, a CDR2 region of SEQ ID NO: 506, and a CDR3 region of SEQ ID NO: 507, and b) a heavy-chain variable region comprising a CDR1 region of SEQ ID NO: 508, a CDR2 region of SEQ ID NO: 509, and a CDR3 region of SEQ ID NO: 510;
39) a binding molecule comprising a) a light-chain variable region comprising a CDR1 region of SEQ ID NO: 511, a CDR2 region of SEQ ID NO: 512, and a CDR3 region of SEQ ID NO: 513, and b) a heavy-chain variable region comprising a CDR1 region of SEQ ID NO: 514, a CDR2 region of SEQ ID NO: 515, and a CDR3 region of SEQ ID NO: 516;
40) a binding molecule comprising a) a light-chain variable region comprising a CDR1 region of SEQ ID NO: 517, a CDR2 region of SEQ ID NO: 518, and a CDR3 region of SEQ ID NO: 519, and b) a heavy-chain variable region comprising a CDR1 region of SEQ ID NO: 520, a CDR2 region of SEQ ID NO: 521, and a CDR3 region of SEQ ID NO: 522;
41) a binding molecule comprising a) a light-chain variable region comprising a CDR1 region of SEQ ID NO: 553, a CDR2 region of SEQ ID NO: 554, and a CDR3 region of SEQ ID NO: 555, and b) a heavy-chain variable region comprising a CDR1 region of SEQ ID NO: 556, a CDR2 region of SEQ ID NO: 557, and a CDR3 region of SEQ ID NO: 558;
42) a binding molecule comprising a) a light-chain variable region comprising a CDR1 region of SEQ ID NO: 559, a CDR2 region of SEQ ID NO: 560, and a CDR3 region of SEQ ID NO: 561, and b) a heavy-chain variable region comprising a CDR1 region of SEQ ID NO: 562, a CDR2 region of SEQ ID NO: 563, and a CDR3 region of SEQ ID NO: 564;
43) a binding molecule comprising a) a light-chain variable region comprising a CDR1 region of SEQ ID NO: 565, a CDR2 region of SEQ ID NO: 566, and a CDR3 region of SEQ ID NO: 567, and b) a heavy-chain variable region comprising a CDR1 region of SEQ ID NO: 568, a CDR2 region of SEQ ID NO: 569, and a CDR3 region of SEQ ID NO: 570;
44) a binding molecule comprising a) a light-chain variable region comprising a CDR1 region of SEQ ID NO: 571, a CDR2 region of SEQ ID NO: 572, and a CDR3 region of SEQ ID NO: 573, and b) a heavy-chain variable region comprising a CDR1 region of SEQ ID NO: 574, a CDR2 region of SEQ ID NO: 575, and a CDR3 region of SEQ ID NO: 576;
45) a binding molecule comprising a) a light-chain variable region comprising a CDR1 region of SEQ ID NO: 583, a CDR2 region of SEQ ID NO: 584, and a CDR3 region of SEQ ID NO: 585, and b) a heavy-chain variable region comprising a CDR1 region of SEQ ID NO: 586, a CDR2 region of SEQ ID NO: 587, and a CDR3 region of SEQ ID NO: 588;
46) a binding molecule comprising a) a light-chain variable region comprising a CDR1 region of SEQ ID NO: 607, a CDR2 region of SEQ ID NO: 608, and a CDR3 region of SEQ ID NO: 609, and b) a heavy-chain variable region comprising a CDR1 region of SEQ ID NO: 610, a CDR2 region of SEQ ID NO: 611, and a CDR3 region of SEQ ID NO: 612;
47) a binding molecule comprising a) a light-chain variable region comprising a CDR1 region of SEQ ID NO: 613, a CDR2 region of SEQ ID NO: 614, and a CDR3 region of SEQ ID NO: 615, and b) a heavy-chain variable region comprising a CDR1 region of SEQ ID NO: 616, a CDR2 region of SEQ ID NO: 617, and a CDR3 region of SEQ ID NO: 618;
48) a binding molecule comprising a) a light-chain variable region comprising a CDR1 region of SEQ ID NO: 619, a CDR2 region of SEQ ID NO: 620, and a CDR3 region of SEQ ID NO: 621, and b) a heavy-chain variable region comprising a CDR1 region of SEQ ID NO: 622, a CDR2 region of SEQ ID NO: 623, and a CDR3 region of SEQ ID NO: 624; and
49) a binding molecule comprising a) a light-chain variable region comprising a CDR1 region of SEQ ID NO: 643, a CDR2 region of SEQ ID NO: 644, and a CDR3 region of SEQ ID NO: 645, and b) a heavy-chain variable region comprising a CDR1 region of SEQ ID NO: 646, a CDR2 region of SEQ ID NO: 647, and a CDR3 region of SEQ ID NO: 648.

2.-9. (canceled)

10. The binding molecule according to claim 1, wherein the binding molecule is an antibody or an antigen-binding fragment thereof.

11. The binding molecule according to claim 10, wherein the antibody is a monoclonal antibody.

12. The binding molecule according to claim 11, wherein the monoclonal antibody is a chimeric antibody, a humanized antibody, or a human antibody.

13. The binding molecule according to claim 10, wherein the antigen-binding fragment is Fab, F(ab′), F(ab′)2, Fv, dAb, Fd, a single-chain antibody fragment (scFv), scFv-Fc, a complementarity-determining region (CDR) fragment, a bivalent single-chain antibody fragment, a single-chain phage antibody fragment, diabody, triabody, or tetrabody.

14. The binding molecule according to claim 1, wherein the binding molecule has neutralizing activity against a mutant virus having a mutation in the spike protein of SARS-coronavirus-2.

15. The binding molecule according to claim 1, wherein the binding molecule has neutralizing activity against SARS-coronavirus-2 S-type, L-type, V-type, G-type, GH-type or GR-type.

16.-40. (canceled)

The application's sequence listing, which the Patent Office published only in electronic form, follows.

SEQUENCE LISTING (1522 sequences)

SEQ ID NO: 1 - protein, 13 aa, Artificial Sequence
  No. 1 LC CDR1
SGSSSNIGSNTVN

SEQ ID NO: 2 - protein, 7 aa, Artificial Sequence
  No. 1 LC CDR2
SNNQRPS

SEQ ID NO: 3 - protein, 11 aa, Artificial Sequence
  No. 1 LC CDR3
ASWDDRLSALV

SEQ ID NO: 4 - protein, 5 aa, Artificial Sequence
  No. 1 HC CDR1
GYYWS

SEQ ID NO: 5 - protein, 16 aa, Artificial Sequence
  No. 1 HC CDR2
EINHSGSTNYNPSLKS

SEQ ID NO: 6 - protein, 20 aa, Artificial Sequence
  No. 1 HC CDR3
GRYSSNWYEAWTPRGIGMDV

SEQ ID NO: 7 - protein, 13 aa, Artificial Sequence
  No. 2 LC CDR1
SGSSSNIGNNYVS

SEQ ID NO: 8 - protein, 7 aa, Artificial Sequence
  No. 2 LC CDR2
DNNKRPS

SEQ ID NO: 9 - protein, 11 aa, Artificial Sequence
  No. 2 LC CDR3
GTWDSSLSGWV

SEQ ID NO: 10 - protein, 5 aa, Artificial Sequence
  No. 2 HC CDR1
SYYMH

SEQ ID NO: 11 - protein, 17 aa, Artificial Sequence
  No. 2  HC CDR2
IINRSGGSTIYAQTFQG

SEQ ID NO: 12 - protein, 8 aa, Artificial Sequence
  No. 2 HC CDR3
GGRHSLDV

SEQ ID NO: 13 - protein, 13 aa, Artificial Sequence
  No. 3 LC CDR1
SGSSSNIGSNTVN

SEQ ID NO: 14 - protein, 7 aa, Artificial Sequence
  No. 3 LC CDR2
SNNQRPS

SEQ ID NO: 15 - protein, 11 aa, Artificial Sequence
  No.3 LC CDR3
AAWDDSLNGPV

SEQ ID NO: 16 - protein, 5 aa, Artificial Sequence
  No. 3 HC CDR1
SYAMS

SEQ ID NO: 17 - protein, 17 aa, Artificial Sequence
  No. 3  HC CDR2
AISGSGGDTYYADSVKG

SEQ ID NO: 18 - protein, 15 aa, Artificial Sequence
  No. 3 HC CDR3
VRYYDFWSGWDVMDV

SEQ ID NO: 19 - protein, 13 aa, Artificial Sequence
  No. 4 LC CDR1
SGSSSNIGNNYVS

SEQ ID NO: 20 - protein, 7 aa, Artificial Sequence
  No. 4 LC CDR2
DNNKRPS

SEQ ID NO: 21 - protein, 11 aa, Artificial Sequence
  No.4 LC CDR3
GTWDSSLSAWV

SEQ ID NO: 22 - protein, 5 aa, Artificial Sequence
  No. 4 HC CDR1
SYYMH

SEQ ID NO: 23 - protein, 17 aa, Artificial Sequence
  No. 4  HC CDR2
IINRSGGSTIYAQTFQG

SEQ ID NO: 24 - protein, 8 aa, Artificial Sequence
  No. 4 HC CDR3
GGRHSLDV

SEQ ID NO: 25 - protein, 13 aa, Artificial Sequence
  No. 5 LC CDR1
SGSSSNIGNNYVS

SEQ ID NO: 26 - protein, 7 aa, Artificial Sequence
  No. 5 LC CDR2
DNNKRPS

SEQ ID NO: 27 - protein, 11 aa, Artificial Sequence
  No.5 LC CDR3
GTWDSSLSAVV

SEQ ID NO: 28 - protein, 5 aa, Artificial Sequence
  No.5 HC CDR1
RYAMS

SEQ ID NO: 29 - protein, 17 aa, Artificial Sequence
  No. 5  HC CDR2
AISGSGGTTYYADSVKG

SEQ ID NO: 30 - protein, 15 aa, Artificial Sequence
  No. 5 HC CDR3
GPRGQDYGDYGFLDY

SEQ ID NO: 31 - protein, 13 aa, Artificial Sequence
  No. 6 LC CDR1
TGSSSNIGNNYVS

SEQ ID NO: 32 - protein, 7 aa, Artificial Sequence
  No. 6 LC CDR2
DNNKRPS

SEQ ID NO: 33 - protein, 11 aa, Artificial Sequence
  No.6 LC CDR3
GTWDSSLSAWV

SEQ ID NO: 34 - protein, 5 aa, Artificial Sequence
  No.6 HC CDR1
SYYMH

SEQ ID NO: 35 - protein, 17 aa, Artificial Sequence
  No. 6 HC CDR2
IINRSGGSTIYAQTFQG

SEQ ID NO: 36 - protein, 8 aa, Artificial Sequence
  No. 6 HC CDR3
GGRHSLDA

SEQ ID NO: 37 - protein, 13 aa, Artificial Sequence
  No. 7 LC CDR1
SGSSSNIGNNYVS

SEQ ID NO: 38 - protein, 7 aa, Artificial Sequence
  No. 7 LC CDR2
DNNKRPS

SEQ ID NO: 39 - protein, 11 aa, Artificial Sequence
  No.7 LC CDR3
GTWDSSLSAWV

SEQ ID NO: 40 - protein, 5 aa, Artificial Sequence
  No. 7 HC CDR1
RKVIA

SEQ ID NO: 41 - protein, 17 aa, Artificial Sequence
  No. 7 HC CDR2
GHAPFVRKPTYAQKFQG

SEQ ID NO: 42 - protein, 11 aa, Artificial Sequence
  No. 7 HC CDR3
KAVTTYSGFDN

SEQ ID NO: 43 - protein, 11 aa, Artificial Sequence
  No. 8 LC CDR1
RASQGISNSLA

SEQ ID NO: 44 - protein, 7 aa, Artificial Sequence
  No. 8 LC CDR2
AASRLES

SEQ ID NO: 45 - protein, 9 aa, Artificial Sequence
  No.8 LC CDR3
QQYYSTPYT

SEQ ID NO: 46 - protein, 5 aa, Artificial Sequence
  No. 8 HC CDR1
NAWMT

SEQ ID NO: 47 - protein, 19 aa, Artificial Sequence
  No. 8 HC CDR2
RIKTKTDGGTTDYAAPVKG

SEQ ID NO: 48 - protein, 6 aa, Artificial Sequence
  No. 8 HC CDR3
HSRPDY

SEQ ID NO: 49 - protein, 13 aa, Artificial Sequence
  No. 9 LC CDR1
SGSSSNIGNNYVS

SEQ ID NO: 50 - protein, 7 aa, Artificial Sequence
  No. 9 LC CDR2
DNNKRPS

SEQ ID NO: 51 - protein, 11 aa, Artificial Sequence
  No.9 LC CDR3
GTWDSSLSAWV

SEQ ID NO: 52 - protein, 5 aa, Artificial Sequence
  No. 9 HC CDR1
RKVIA

SEQ ID NO: 53 - protein, 17 aa, Artificial Sequence
  No. 9 HC CDR2
GHAPFVRKPTYAQKFQG

SEQ ID NO: 54 - protein, 11 aa, Artificial Sequence
  No. 9 HC CDR3
KAVTTYSGFDT

SEQ ID NO: 55 - protein, 11 aa, Artificial Sequence
  No. 10 LC CDR1
RASQSVSSNLA

SEQ ID NO: 56 - protein, 7 aa, Artificial Sequence
  No. 10 LC CDR2
WASTRES

SEQ ID NO: 57 - protein, 9 aa, Artificial Sequence
  No.10 LC CDR3
LQYFTIPWT

SEQ ID NO: 58 - protein, 5 aa, Artificial Sequence
  No. 10 HC CDR1
NAWMS

SEQ ID NO: 59 - protein, 19 aa, Artificial Sequence
  No.10 HC CDR2
RIKTKTDGGTTDYAAPVKG

SEQ ID NO: 60 - protein, 6 aa, Artificial Sequence
  No. 10 HC CDR3
FSTPDY

SEQ ID NO: 61 - protein, 14 aa, Artificial Sequence
  No. 11 LC CDR1
TGTSSDVGGYNYVS

SEQ ID NO: 62 - protein, 7 aa, Artificial Sequence
  No. 11 LC CDR2
DVSKRPS

SEQ ID NO: 63 - protein, 10 aa, Artificial Sequence
  No.11 LC CDR3
SSYTSSSTLV

SEQ ID NO: 64 - protein, 5 aa, Artificial Sequence
  No. 11  HC CDR1
RYAIS

SEQ ID NO: 65 - protein, 17 aa, Artificial Sequence
  No.11 HC CDR2
GIIPIFGKVNYAQKFQD

SEQ ID NO: 66 - protein, 13 aa, Artificial Sequence
  No. 11 HC CDR3
GGSTWYGGNWFDP

SEQ ID NO: 67 - protein, 11 aa, Artificial Sequence
  No. 12 LC CDR1
SGDVLAKKYAR

SEQ ID NO: 68 - protein, 7 aa, Artificial Sequence
  No. 12 LC CDR2
KDSERPS

SEQ ID NO: 69 - protein, 9 aa, Artificial Sequence
  No.12 LC CDR3
YSAADNNGV

SEQ ID NO: 70 - protein, 5 aa, Artificial Sequence
  No. 12  HC CDR1
SDAMH

SEQ ID NO: 71 - protein, 17 aa, Artificial Sequence
  No.12 HC CDR2
VISYDGSNEYYADSVKG

SEQ ID NO: 72 - protein, 18 aa, Artificial Sequence
  No. 12 HC CDR3
EATYDSSGRPTGDYGMDV

SEQ ID NO: 73 - protein, 13 aa, Artificial Sequence
  No. 13 LC CDR1
SGSSSNIGSNTVN

SEQ ID NO: 74 - protein, 7 aa, Artificial Sequence
  No. 13 LC CDR2
SNNQRPS

SEQ ID NO: 75 - protein, 11 aa, Artificial Sequence
  No.13 LC CDR3
AAWDDSLNGVV

SEQ ID NO: 76 - protein, 5 aa, Artificial Sequence
  No. 13  HC CDR1
GYYWS

SEQ ID NO: 77 - protein, 16 aa, Artificial Sequence
  No.13 HC CDR2
EINHSGSTNYNPSLKS

SEQ ID NO: 78 - protein, 20 aa, Artificial Sequence
  No. 13 HC CDR3
GRYSSNWYEAWTPRGIGMDV

SEQ ID NO: 79 - protein, 14 aa, Artificial Sequence
  No. 14 LC CDR1
TGTSSDVGGYNYVS

SEQ ID NO: 80 - protein, 7 aa, Artificial Sequence
  No. 14 LC CDR2
DVSNRPS

SEQ ID NO: 81 - protein, 12 aa, Artificial Sequence
  No.14 LC CDR3
SSYTSSSTSHVV

SEQ ID NO: 82 - protein, 5 aa, Artificial Sequence
  No. 14  HC CDR1
SYAMN

SEQ ID NO: 83 - protein, 17 aa, Artificial Sequence
  No.14 HC CDR2
AISGSGGTTYYADSVKG

SEQ ID NO: 84 - protein, 20 aa, Artificial Sequence
  No. 14 HC CDR3
APSDLSFIWTGYYSEYYFDY

SEQ ID NO: 85 - protein, 14 aa, Artificial Sequence
  No. 15 LC CDR1
TGTSSDVGGYNYVS

SEQ ID NO: 86 - protein, 7 aa, Artificial Sequence
  No. 15 LC CDR2
DVSKRPS

SEQ ID NO: 87 - protein, 10 aa, Artificial Sequence
  No.15 LC CDR3
SSYTSSSTLV

SEQ ID NO: 88 - protein, 6 aa, Artificial Sequence
  No. 15  HC CDR1
RGDYWG

SEQ ID NO: 89 - protein, 16 aa, Artificial Sequence
  No.15 HC CDR2
SIYHSGSTYYNPSLKS

SEQ ID NO: 90 - protein, 14 aa, Artificial Sequence
  No. 15 HC CDR3
HGTSGYYYPNWFDP

SEQ ID NO: 91 - protein, 13 aa, Artificial Sequence
  No. 16 LC CDR1
SGSSSNIGSNTVN

SEQ ID NO: 92 - protein, 7 aa, Artificial Sequence
  No. 16 LC CDR2
SNNQRPS

SEQ ID NO: 93 - protein, 11 aa, Artificial Sequence
  No.16 LC CDR3
AAWDDSLNASL

SEQ ID NO: 94 - protein, 5 aa, Artificial Sequence
  No. 16  HC CDR1
GYYWS

SEQ ID NO: 95 - protein, 16 aa, Artificial Sequence
  No.16 HC CDR2
EINHSGSTNYNPSLKS

SEQ ID NO: 96 - protein, 20 aa, Artificial Sequence
  No. 16 HC CDR3
GRYSSNWYEAWTPRGIGMDV

SEQ ID NO: 97 - protein, 13 aa, Artificial Sequence
  No. 17 LC CDR1
SGSTSNIGSNTVN

SEQ ID NO: 98 - protein, 7 aa, Artificial Sequence
  No. 17 LC CDR2
TDNRRPS

SEQ ID NO: 99 - protein, 11 aa, Artificial Sequence
  No.17 LC CDR3
AAWDDSLNGYV

SEQ ID NO: 100 - protein, 5 aa, Artificial Sequence
  No. 17  HC CDR1
GYYWS

SEQ ID NO: 101 - protein, 16 aa, Artificial Sequence
  No.17 HC CDR2
EINHSGSTNYNPSLKS

SEQ ID NO: 102 - protein, 20 aa, Artificial Sequence
  No. 17 HC CDR3
GRYSSNWYEAWTPRGIGMDV

SEQ ID NO: 103 - protein, 13 aa, Artificial Sequence
  No. 18 LC CDR1
SGSSSNIGSNTVN

SEQ ID NO: 104 - protein, 7 aa, Artificial Sequence
  No. 18 LC CDR2
SNNQRPS

SEQ ID NO: 105 - protein, 11 aa, Artificial Sequence
  No.18 LC CDR3
AAWDDSLNGPV

SEQ ID NO: 106 - protein, 5 aa, Artificial Sequence
  No. 18  HC CDR1
GYYWS

SEQ ID NO: 107 - protein, 16 aa, Artificial Sequence
  No.18 HC CDR2
EINHSGSTNYNPSLKS

SEQ ID NO: 108 - protein, 20 aa, Artificial Sequence
  No. 18 HC CDR3
GRYSSNWYEAWTPRGIGMDV

SEQ ID NO: 109 - protein, 13 aa, Artificial Sequence
  No. 19 LC CDR1
SGSSSNIGSNTVN

SEQ ID NO: 110 - protein, 7 aa, Artificial Sequence
  No. 19 LC CDR2
SNNQRPS

SEQ ID NO: 111 - protein, 11 aa, Artificial Sequence
  No.19 LC CDR3
AARDDSLNGAV

SEQ ID NO: 112 - protein, 5 aa, Artificial Sequence
  No. 19  HC CDR1
GYYWS

SEQ ID NO: 113 - protein, 16 aa, Artificial Sequence
  No.19 HC CDR2
EINHSGSTNYNPSLKS

SEQ ID NO: 114 - protein, 20 aa, Artificial Sequence
  No. 19 HC CDR3
GRYSSNWYEAWTPRGIGMDV

SEQ ID NO: 115 - protein, 13 aa, Artificial Sequence
  No. 20 LC CDR1
SGSSSNIGNNYVS

SEQ ID NO: 116 - protein, 7 aa, Artificial Sequence
  No. 20 LC CDR2
DNNKRPS

SEQ ID NO: 117 - protein, 11 aa, Artificial Sequence
  No.20 LC CDR3
GTWDSSLSAGP

SEQ ID NO: 118 - protein, 7 aa, Artificial Sequence
  No. 20  HC CDR1
TSGVGVG

SEQ ID NO: 119 - protein, 16 aa, Artificial Sequence
  No.20 HC CDR2
LIDWDDNKYYTTSLKT

SEQ ID NO: 120 - protein, 18 aa, Artificial Sequence
  No.20  HC CDR3
IPGFLRYRNRYYYYGMDV

SEQ ID NO: 121 - protein, 11 aa, Artificial Sequence
  No. 21 LC CDR1
RASQSVSSYLA

SEQ ID NO: 122 - protein, 7 aa, Artificial Sequence
  No. 21 LC CDR2
DASNRAT

SEQ ID NO: 123 - protein, 11 aa, Artificial Sequence
  No.21 LC CDR3
QEYGSSPRRVT

SEQ ID NO: 124 - protein, 7 aa, Artificial Sequence
  No. 21  HC CDR1
SSSYYWG

SEQ ID NO: 125 - protein, 16 aa, Artificial Sequence
  No.21 HC CDR2
SIYYSGSTYYNPSLKS

SEQ ID NO: 126 - protein, 19 aa, Artificial Sequence
  No.21  HC CDR3
GSRGYYDFLTGYSTGGFDY

SEQ ID NO: 127 - protein, 11 aa, Artificial Sequence
  No. 22 LC CDR1
RASQSVSSYLA

SEQ ID NO: 128 - protein, 7 aa, Artificial Sequence
  No. 22 LC CDR2
DASTRAT

SEQ ID NO: 129 - protein, 9 aa, Artificial Sequence
  No.22 LC CDR3
QQYYQVPLT

SEQ ID NO: 130 - protein, 7 aa, Artificial Sequence
  No. 22  HC CDR1
SSSYYWG

SEQ ID NO: 131 - protein, 16 aa, Artificial Sequence
  No.22 HC CDR2
SIYYSGSTYYNPSLKS

SEQ ID NO: 132 - protein, 19 aa, Artificial Sequence
  No. 22  HC CDR3
GSRGYYDFLTGYSTGGFDY

SEQ ID NO: 133 - protein, 13 aa, Artificial Sequence
  No. 23 LC CDR1
SGSSSNIGNNYVS

SEQ ID NO: 134 - protein, 7 aa, Artificial Sequence
  No. 23 LC CDR2
DNNKRPS

SEQ ID NO: 135 - protein, 11 aa, Artificial Sequence
  No.23 LC CDR3
GTWDSSLSAVV

SEQ ID NO: 136 - protein, 5 aa, Artificial Sequence
  No. 23  HC CDR1
DYGMH

SEQ ID NO: 137 - protein, 17 aa, Artificial Sequence
  No.23 HC CDR2
AISYDGSNKYYADSVKG

SEQ ID NO: 138 - protein, 19 aa, Artificial Sequence
  No. 23  HC CDR3
DSGLYGSGWSTYQYYAMDV

SEQ ID NO: 139 - protein, 14 aa, Artificial Sequence
  No. 24 LC CDR1
TGTSSDVGGYNYVS

SEQ ID NO: 140 - protein, 7 aa, Artificial Sequence
  No. 24 LC CDR2
DVSKRPS

SEQ ID NO: 141 - protein, 10 aa, Artificial Sequence
  No.24 LC CDR3
SSYTSSSTYV

SEQ ID NO: 142 - protein, 5 aa, Artificial Sequence
  No. 24  HC CDR1
ELSIH

SEQ ID NO: 143 - protein, 17 aa, Artificial Sequence
  No. 24 HC CDR2
GFDPEDAETIYAQKFQG

SEQ ID NO: 144 - protein, 12 aa, Artificial Sequence
  No. 24  HC CDR3
SPAVTTAGWFDP

SEQ ID NO: 145 - protein, 13 aa, Artificial Sequence
  No. 25 LC CDR1
SGSSSNIGTNTVN

SEQ ID NO: 146 - protein, 7 aa, Artificial Sequence
  No. 25 LC CDR2
SNNQRPS

SEQ ID NO: 147 - protein, 11 aa, Artificial Sequence
  No.25 LC CDR3
AAWDDSLNGLL

SEQ ID NO: 148 - protein, 5 aa, Artificial Sequence
  No. 25  HC CDR1
GYYWS

SEQ ID NO: 149 - protein, 16 aa, Artificial Sequence
  No. 25 HC CDR2
EINHSGSTNYNPSLKS

SEQ ID NO: 150 - protein, 20 aa, Artificial Sequence
  No. 25  HC CDR3
GRYSSNWYEAWTPRGIGMDV

SEQ ID NO: 151 - protein, 14 aa, Artificial Sequence
  No. 26 LC CDR1
TGTSSDVGGYNYVS

SEQ ID NO: 152 - protein, 7 aa, Artificial Sequence
  No. 26 LC CDR2
DVGKRPS

SEQ ID NO: 153 - protein, 10 aa, Artificial Sequence
  No.26 LC CDR3
SSYTSSSTWV

SEQ ID NO: 154 - protein, 5 aa, Artificial Sequence
  No. 26  HC CDR1
FYAIS

SEQ ID NO: 155 - protein, 17 aa, Artificial Sequence
  No. 26 HC CDR2
GIIPLFGTAKYAQRFQD

SEQ ID NO: 156 - protein, 12 aa, Artificial Sequence
  No. 26  HC CDR3
GGWIYRGNWFDP

SEQ ID NO: 157 - protein, 14 aa, Artificial Sequence
  No. 27 LC CDR1
TGSSSNIGAGYDVH

SEQ ID NO: 158 - protein, 7 aa, Artificial Sequence
  No. 27 LC CDR2
GNSNRPS

SEQ ID NO: 159 - protein, 11 aa, Artificial Sequence
  No.27 LC CDR3
QSYDSSLSGWV

SEQ ID NO: 160 - protein, 5 aa, Artificial Sequence
  No. 27  HC CDR1
NYGIS

SEQ ID NO: 161 - protein, 17 aa, Artificial Sequence
  No. 27 HC CDR2
GISSHNGNTKYAQKLQG

SEQ ID NO: 162 - protein, 20 aa, Artificial Sequence
  No. 27  HC CDR3
EGGYYYGSGSYYNPRFAFDI

SEQ ID NO: 163 - protein, 14 aa, Artificial Sequence
  No. 28 LC CDR1
TGTSSDVGGYNYVS

SEQ ID NO: 164 - protein, 7 aa, Artificial Sequence
  No. 28 LC CDR2
EVSKRPS

SEQ ID NO: 165 - protein, 10 aa, Artificial Sequence
  No.28 LC CDR3
SSYAGSNYVV

SEQ ID NO: 166 - protein, 5 aa, Artificial Sequence
  No. 28  HC CDR1
SYAMS

SEQ ID NO: 167 - protein, 17 aa, Artificial Sequence
  No. 28 HC CDR2
AISGSGGTTYYADSVKG

SEQ ID NO: 168 - protein, 20 aa, Artificial Sequence
  No. 28  HC CDR3
APSDLSFIWTGYYSEYYFDY

SEQ ID NO: 169 - protein, 14 aa, Artificial Sequence
  No. 29 LC CDR1
TGTSSDVGGYNYVS

SEQ ID NO: 170 - protein, 7 aa, Artificial Sequence
  No. 29 LC CDR2
DVSNRPS

SEQ ID NO: 171 - protein, 11 aa, Artificial Sequence
  No.29 LC CDR3
SSYTSSSTLGV

SEQ ID NO: 172 - protein, 5 aa, Artificial Sequence
  No. 29  HC CDR1
SYAMS

SEQ ID NO: 173 - protein, 17 aa, Artificial Sequence
  No. 29 HC CDR2
AISGSGGTTYYADSVKG

SEQ ID NO: 174 - protein, 20 aa, Artificial Sequence
  No. 29  HC CDR3
APSDLSFIWTGYYSEYYFDY

SEQ ID NO: 175 - protein, 13 aa, Artificial Sequence
  No. 30 LC CDR1
SGSSSNIGNNYVS

SEQ ID NO: 176 - protein, 7 aa, Artificial Sequence
  No. 30 LC CDR2
DNNKRPS

SEQ ID NO: 177 - protein, 11 aa, Artificial Sequence
  No.30 LC CDR3
GTWDSSLSAWV

SEQ ID NO: 178 - protein, 5 aa, Artificial Sequence
  No. 30  HC CDR1
GYYMH

SEQ ID NO: 179 - protein, 17 aa, Artificial Sequence
  No. 30 HC CDR2
VINRSGGSTIYAQTFQG

SEQ ID NO: 180 - protein, 8 aa, Artificial Sequence
  No. 30  HC CDR3
GGRHSLDV

SEQ ID NO: 181 - protein, 13 aa, Artificial Sequence
  No. 31  LC CDR1
SGSSSNIGSNTVN

SEQ ID NO: 182 - protein, 7 aa, Artificial Sequence
  No. 31  LC CDR2
SNNQRPS

SEQ ID NO: 183 - protein, 11 aa, Artificial Sequence
  No. 31  LC CDR3
AAWDDSLNGLV

SEQ ID NO: 184 - protein, 5 aa, Artificial Sequence
  No. 31  HC CDR1
SYWIV

SEQ ID NO: 185 - protein, 17 aa, Artificial Sequence
  No. 31  HC CDR2
TIYPGDSDTRYSPSFQG

SEQ ID NO: 186 - protein, 10 aa, Artificial Sequence
  No. 31  HC CDR3
GPNIYNWFDS

SEQ ID NO: 187 - protein, 11 aa, Artificial Sequence
  No. 32  LC CDR1
RASQSISSYLN

SEQ ID NO: 188 - protein, 7 aa, Artificial Sequence
  No. 32  LC CDR2
AASSLQS

SEQ ID NO: 189 - protein, 9 aa, Artificial Sequence
  No. 32  LC CDR3
QQSYSTPLT

SEQ ID NO: 190 - protein, 5 aa, Artificial Sequence
  No. 32  HC CDR1
SNYMT

SEQ ID NO: 191 - protein, 16 aa, Artificial Sequence
  No. 32  HC CDR2
IIYPGGSTYYADSVKG

SEQ ID NO: 192 - protein, 11 aa, Artificial Sequence
  No. 32  HC CDR3
DLPLTGTTLDY

SEQ ID NO: 193 - protein, 11 aa, Artificial Sequence
  No. 33  LC CDR1
GGNNIGSKSVH

SEQ ID NO: 194 - protein, 7 aa, Artificial Sequence
  No. 33  LC CDR2
DDSDRPS

SEQ ID NO: 195 - protein, 11 aa, Artificial Sequence
  No. 33  LC CDR3
QVWDSSSDHVV

SEQ ID NO: 196 - protein, 5 aa, Artificial Sequence
  No. 33  HC CDR1
DYGMH

SEQ ID NO: 197 - protein, 17 aa, Artificial Sequence
  No. 33  HC CDR2
AISYDGSNKYYADSVKG

SEQ ID NO: 198 - protein, 19 aa, Artificial Sequence
  No. 33  HC CDR3
DSGLYGSGWSTYQYYAMDV

SEQ ID NO: 199 - protein, 14 aa, Artificial Sequence
  No. 34  LC CDR1
TGSSSNIGAGYDVH

SEQ ID NO: 200 - protein, 7 aa, Artificial Sequence
  No. 34  LC CDR2
GNSNRPS

SEQ ID NO: 201 - protein, 11 aa, Artificial Sequence
  No. 34  LC CDR3
QSYDSSLSGWV

SEQ ID NO: 202 - protein, 5 aa, Artificial Sequence
  No. 34  HC CDR1
NYPLT

SEQ ID NO: 203 - protein, 17 aa, Artificial Sequence
  No. 34  HC CDR2
GIIPIIGATNYAQKFQG

SEQ ID NO: 204 - protein, 15 aa, Artificial Sequence
  No. 34  HC CDR3
GRGYSGYGAAYYFDY

SEQ ID NO: 205 - protein, 14 aa, Artificial Sequence
  No. 35  LC CDR1
TGSSSNIGAGYDVH

SEQ ID NO: 206 - protein, 7 aa, Artificial Sequence
  No. 35  LC CDR2
GNSNRPS

SEQ ID NO: 207 - protein, 12 aa, Artificial Sequence
  No. 35  LC CDR3
QSYDSSLSGSWV

SEQ ID NO: 208 - protein, 5 aa, Artificial Sequence
  No. 35  HC CDR1
RYAIS

SEQ ID NO: 209 - protein, 17 aa, Artificial Sequence
  No. 35  HC CDR2
GIIPIFGTGNYAQKFQG

SEQ ID NO: 210 - protein, 19 aa, Artificial Sequence
  No. 35  HC CDR3
SLYYYDRSGYPISEDYFDY

SEQ ID NO: 211 - protein, 12 aa, Artificial Sequence
  No. 36  LC CDR1
RASQSVGSSYLA

SEQ ID NO: 212 - protein, 7 aa, Artificial Sequence
  No. 36  LC CDR2
GASSRAT

SEQ ID NO: 213 - protein, 9 aa, Artificial Sequence
  No. 36  LC CDR3
QQYGSSPLT

SEQ ID NO: 214 - protein, 7 aa, Artificial Sequence
  No. 36  HC CDR1
SSSYYWG

SEQ ID NO: 215 - protein, 16 aa, Artificial Sequence
  No. 36  HC CDR2
NIFYSGSTYYNPSLKS

SEQ ID NO: 216 - protein, 19 aa, Artificial Sequence
  No. 36  HC CDR3
GSRGYYDILTGYSTGGFDY

SEQ ID NO: 217 - protein, 13 aa, Artificial Sequence
  No. 37  LC CDR1
SGSSSNIGSNTVN

SEQ ID NO: 218 - protein, 7 aa, Artificial Sequence
  No. 37  LC CDR2
TNNRRPS

SEQ ID NO: 219 - protein, 11 aa, Artificial Sequence
  No. 37  LC CDR3
AAWDDSLNGLV

SEQ ID NO: 220 - protein, 5 aa, Artificial Sequence
  No. 37  HC CDR1
SHWIA

SEQ ID NO: 221 - protein, 17 aa, Artificial Sequence
  No. 37  HC CDR2
IIYPGDSDSRYSPSFQG

SEQ ID NO: 222 - protein, 10 aa, Artificial Sequence
  No. 37  HC CDR3
GPNLYNWFDS

SEQ ID NO: 223 - protein, 11 aa, Artificial Sequence
  No. 38  LC CDR1
GGNNIGSKSVH

SEQ ID NO: 224 - protein, 7 aa, Artificial Sequence
  No. 38  LC CDR2
YDSDRPS

SEQ ID NO: 225 - protein, 11 aa, Artificial Sequence
  No. 38  LC CDR3
QVWDSSSDHWV

SEQ ID NO: 226 - protein, 5 aa, Artificial Sequence
  No. 38  HC CDR1
DYAMS

SEQ ID NO: 227 - protein, 17 aa, Artificial Sequence
  No. 38  HC CDR2
VISGSGGSTSNADSVKG

SEQ ID NO: 228 - protein, 20 aa, Artificial Sequence
  No. 38  HC CDR3
VYCGDDCYPVVGTPGDAFDI

SEQ ID NO: 229 - protein, 13 aa, Artificial Sequence
  No. 39  LC CDR1
SGSSSNIGNNYVS

SEQ ID NO: 230 - protein, 7 aa, Artificial Sequence
  No. 39  LC CDR2
DNNKRPS

SEQ ID NO: 231 - protein, 12 aa, Artificial Sequence
  No. 39  LC CDR3
GTWDSSLSAGWV

SEQ ID NO: 232 - protein, 5 aa, Artificial Sequence
  No. 39  HC CDR1
DYGMH

SEQ ID NO: 233 - protein, 17 aa, Artificial Sequence
  No. 39  HC CDR2
AISYDGSNKYYADSVKG

SEQ ID NO: 234 - protein, 19 aa, Artificial Sequence
  No. 39  HC CDR3
DSGLYGSGWSTYQYYAMDV

SEQ ID NO: 235 - protein, 11 aa, Artificial Sequence
  No. 40  LC CDR1
RASQSVSSYLA

SEQ ID NO: 236 - protein, 7 aa, Artificial Sequence
  No. 40  LC CDR2
DASNRAT

SEQ ID NO: 237 - protein, 9 aa, Artificial Sequence
  No. 40  LC CDR3
QQYGSSPQT

SEQ ID NO: 238 - protein, 7 aa, Artificial Sequence
  No. 40  HC CDR1
SSSYYWG

SEQ ID NO: 239 - protein, 16 aa, Artificial Sequence
  No. 40  HC CDR2
NIFYSGSTYYNPSLKS

SEQ ID NO: 240 - protein, 19 aa, Artificial Sequence
  No. 40  HC CDR3
GSRGYYDILTGYSTGGFDY

SEQ ID NO: 241 - protein, 13 aa, Artificial Sequence
  No. 41  LC CDR1
SGSSSNIGSNTVN

SEQ ID NO: 242 - protein, 7 aa, Artificial Sequence
  No. 41  LC CDR2
SNNQRPS

SEQ ID NO: 243 - protein, 11 aa, Artificial Sequence
  No. 41  LC CDR3
AAWDDSLNGYV

SEQ ID NO: 244 - protein, 5 aa, Artificial Sequence
  No. 41  HC CDR1
GYYWS

SEQ ID NO: 245 - protein, 16 aa, Artificial Sequence
  No. 41  HC CDR2
EINHSGSTNYNPSLKS

SEQ ID NO: 246 - protein, 16 aa, Artificial Sequence
  No. 41  HC CDR3
GRYYSSWYGPRTWFDP

SEQ ID NO: 247 - protein, 13 aa, Artificial Sequence
  No. 42  LC CDR1
TRSSGSIASNYVQ

SEQ ID NO: 248 - protein, 7 aa, Artificial Sequence
  No. 42  LC CDR2
EDNQRPS

SEQ ID NO: 249 - protein, 9 aa, Artificial Sequence
  No. 42  LC CDR3
QSYDSSNWV

SEQ ID NO: 250 - protein, 7 aa, Artificial Sequence
  No. 42  HC CDR1
SSSYYWG

SEQ ID NO: 251 - protein, 16 aa, Artificial Sequence
  No. 42  HC CDR2
NFYYSGSTYYNPSLKS

SEQ ID NO: 252 - protein, 10 aa, Artificial Sequence
  No. 42  HC CDR3
QEWLRGGFDD

SEQ ID NO: 253 - protein, 13 aa, Artificial Sequence
  No. 43  LC CDR1
SGSSSNIGGNYVH

SEQ ID NO: 254 - protein, 7 aa, Artificial Sequence
  No. 43  LC CDR2
SNDQRPS

SEQ ID NO: 255 - protein, 11 aa, Artificial Sequence
  No. 43  LC CDR3
AAWDDSLNGRV

SEQ ID NO: 256 - protein, 5 aa, Artificial Sequence
  No. 43  HC CDR1
SYAIS

SEQ ID NO: 257 - protein, 17 aa, Artificial Sequence
  No. 43  HC CDR2
GIIPIFGTANYAQRFQG

SEQ ID NO: 258 - protein, 22 aa, Artificial Sequence
  No. 43  HC CDR3
DGVVVPAVMYDTTDPYYYGMDV

SEQ ID NO: 259 - protein, 11 aa, Artificial Sequence
  No. 44  LC CDR1
RASQSVSSYLA

SEQ ID NO: 260 - protein, 7 aa, Artificial Sequence
  No. 44  LC CDR2
DASSRAT

SEQ ID NO: 261 - protein, 10 aa, Artificial Sequence
  No. 44  LC CDR3
QQYGSSPSIT

SEQ ID NO: 262 - protein, 7 aa, Artificial Sequence
  No. 44  HC CDR1
SSSYYWG

SEQ ID NO: 263 - protein, 16 aa, Artificial Sequence
  No. 44  HC CDR2
SIYYSGSTYYNPSLKS

SEQ ID NO: 264 - protein, 19 aa, Artificial Sequence
  No. 44  HC CDR3
GSRGYYDFLTGYSTGGFDY

SEQ ID NO: 265 - protein, 14 aa, Artificial Sequence
  No. 45  LC CDR1
TGSSSNIGAGYDVH

SEQ ID NO: 266 - protein, 7 aa, Artificial Sequence
  No. 45  LC CDR2
GNSNRPS

SEQ ID NO: 267 - protein, 11 aa, Artificial Sequence
  No. 45  LC CDR3
QSYDSSLSGPV

SEQ ID NO: 268 - protein, 5 aa, Artificial Sequence
  No. 45  HC CDR1
SYDIS

SEQ ID NO: 269 - protein, 17 aa, Artificial Sequence
  No. 45  HC CDR2
GIIPILGIPNYAQKFQG

SEQ ID NO: 270 - protein, 15 aa, Artificial Sequence
  No. 45  HC CDR3
SRGYSGYGANWYFDL

SEQ ID NO: 271 - protein, 13 aa, Artificial Sequence
  No. 46  LC CDR1
TRSSGSIASNYVQ

SEQ ID NO: 272 - protein, 7 aa, Artificial Sequence
  No. 46  LC CDR2
EDNQRPS

SEQ ID NO: 273 - protein, 9 aa, Artificial Sequence
  No. 46  LC CDR3
QSYDSSNWV

SEQ ID NO: 274 - protein, 5 aa, Artificial Sequence
  No. 46  HC CDR1
RYGIS

SEQ ID NO: 275 - protein, 17 aa, Artificial Sequence
  No. 46  HC CDR2
WISAYNGNTKYAQKLQG

SEQ ID NO: 276 - protein, 11 aa, Artificial Sequence
  No. 46  HC CDR3
VLGIAVAGTPI

SEQ ID NO: 277 - protein, 11 aa, Artificial Sequence
  No. 47  LC CDR1
RASQSVRSDIA

SEQ ID NO: 278 - protein, 7 aa, Artificial Sequence
  No. 47  LC CDR2
DTSTRAT

SEQ ID NO: 279 - protein, 9 aa, Artificial Sequence
  No. 47  LC CDR3
QQYYTTPFT

SEQ ID NO: 280 - protein, 5 aa, Artificial Sequence
  No. 47  HC CDR1
DYYIQ

SEQ ID NO: 281 - protein, 17 aa, Artificial Sequence
  No. 47  HC CDR2
WINPNSGDTNYAHKFQG

SEQ ID NO: 282 - protein, 13 aa, Artificial Sequence
  No. 47  HC CDR3
GGSYYNVMYWFDP

SEQ ID NO: 283 - protein, 14 aa, Artificial Sequence
  No. 48  LC CDR1
TGSSSNIGAGYDVH

SEQ ID NO: 284 - protein, 7 aa, Artificial Sequence
  No. 48  LC CDR2
GNSNRPS

SEQ ID NO: 285 - protein, 12 aa, Artificial Sequence
  No. 48  LC CDR3
QSYDSSLSGLWV

SEQ ID NO: 286 - protein, 5 aa, Artificial Sequence
  No. 48  HC CDR1
SNYMS

SEQ ID NO: 287 - protein, 16 aa, Artificial Sequence
  No. 48  HC CDR2
VIYPGGSTFFADSVQG

SEQ ID NO: 288 - protein, 14 aa, Artificial Sequence
  No. 48  HC CDR3
SYDFLTDYTDAFDI

SEQ ID NO: 289 - protein, 14 aa, Artificial Sequence
  No. 49  LC CDR1
TGTSSDVGGYNYVS

SEQ ID NO: 290 - protein, 7 aa, Artificial Sequence
  No. 49  LC CDR2
DVSNRPS

SEQ ID NO: 291 - protein, 10 aa, Artificial Sequence
  No. 49  LC CDR3
SSYTSSSPWV

SEQ ID NO: 292 - protein, 5 aa, Artificial Sequence
  No. 49  HC CDR1
SYAMS

SEQ ID NO: 293 - protein, 17 aa, Artificial Sequence
  No. 49  HC CDR2
GISGSGGSTYYADSVKG

SEQ ID NO: 294 - protein, 11 aa, Artificial Sequence
  No. 49  HC CDR3
GVVTADWYFDL

SEQ ID NO: 295 - protein, 14 aa, Artificial Sequence
  No. 50  LC CDR1
TGSSSNIGAGYDVH

SEQ ID NO: 296 - protein, 7 aa, Artificial Sequence
  No. 50  LC CDR2
GNSNRPS

SEQ ID NO: 297 - protein, 12 aa, Artificial Sequence
  No. 50  LC CDR3
QSYDSSLSGPWV

SEQ ID NO: 298 - protein, 5 aa, Artificial Sequence
  No. 50  HC CDR1
RYAIN

SEQ ID NO: 299 - protein, 17 aa, Artificial Sequence
  No. 50  HC CDR2
GIIPLLGTADYPQKFQG

SEQ ID NO: 300 - protein, 19 aa, Artificial Sequence
  No. 50  HC CDR3
TLYYYDRSGNARTDDYFDH

SEQ ID NO: 301 - protein, 11 aa, Artificial Sequence
  No. 51  LC CDR1
RASQSVSSYLA

SEQ ID NO: 302 - protein, 7 aa, Artificial Sequence
  No. 51  LC CDR2
DASNRAT

SEQ ID NO: 303 - protein, 9 aa, Artificial Sequence
  No. 51  LC CDR3
QQYGSSPLT

SEQ ID NO: 304 - protein, 7 aa, Artificial Sequence
  No. 51  HC CDR1
SSSYYWG

SEQ ID NO: 305 - protein, 16 aa, Artificial Sequence
  No. 51  HC CDR2
SIYYSGSTYYNPSLKS

SEQ ID NO: 306 - protein, 19 aa, Artificial Sequence
  No. 51  HC CDR3
GSRGYYDFLTGYSTGGFDY

SEQ ID NO: 307 - protein, 11 aa, Artificial Sequence
  No. 52  LC CDR1
RASQSVNSNLA

SEQ ID NO: 308 - protein, 7 aa, Artificial Sequence
  No. 52  LC CDR2
DASTRAT

SEQ ID NO: 309 - protein, 9 aa, Artificial Sequence
  No. 52  LC CDR3
QQYNNWPLT

SEQ ID NO: 310 - protein, 7 aa, Artificial Sequence
  No. 52  HC CDR1
SSSYYWG

SEQ ID NO: 311 - protein, 16 aa, Artificial Sequence
  No. 52  HC CDR2
SIYYSGSTYYNPSLKS

SEQ ID NO: 312 - protein, 19 aa, Artificial Sequence
  No. 52  HC CDR3
GSRGYYDFLTGYSTGGFDY

SEQ ID NO: 313 - protein, 11 aa, Artificial Sequence
  No. 53  LC CDR1
RASQSISSYLN

SEQ ID NO: 314 - protein, 7 aa, Artificial Sequence
  No. 53  LC CDR2
AASSLQS

SEQ ID NO: 315 - protein, 9 aa, Artificial Sequence
  No. 53  LC CDR3
QQSYSTPLT

SEQ ID NO: 316 - protein, 5 aa, Artificial Sequence
  No. 53  HC CDR1
SNYMS

SEQ ID NO: 317 - protein, 16 aa, Artificial Sequence
  No. 53  HC CDR2
VIYPGGSTFFADSVQG

SEQ ID NO: 318 - protein, 14 aa, Artificial Sequence
  No. 53  HC CDR3
SYDFLTDYTDAFDI

SEQ ID NO: 319 - protein, 14 aa, Artificial Sequence
  No. 54  LC CDR1
TGSSSNIGAGYDVH

SEQ ID NO: 320 - protein, 7 aa, Artificial Sequence
  No. 54  LC CDR2
GNSNRPS

SEQ ID NO: 321 - protein, 11 aa, Artificial Sequence
  No. 54  LC CDR3
QSYDSSLSGVV

SEQ ID NO: 322 - protein, 5 aa, Artificial Sequence
  No. 54  HC CDR1
DYAMH

SEQ ID NO: 323 - protein, 17 aa, Artificial Sequence
  No. 54  HC CDR2
GISWNSGTIGYADSVKG

SEQ ID NO: 324 - protein, 19 aa, Artificial Sequence
  No. 54  HC CDR3
EELGPYSNRWYSSSDGMDV

SEQ ID NO: 325 - protein, 11 aa, Artificial Sequence
  No. 55  LC CDR1
RASQSISSYLN

SEQ ID NO: 326 - protein, 7 aa, Artificial Sequence
  No. 55  LC CDR2
AASSLQS

SEQ ID NO: 327 - protein, 9 aa, Artificial Sequence
  No. 55  LC CDR3
QQSYSTPLT

SEQ ID NO: 328 - protein, 5 aa, Artificial Sequence
  No. 55  HC CDR1
SSAIN

SEQ ID NO: 329 - protein, 17 aa, Artificial Sequence
  No. 55  HC CDR2
GIIPIFGTVNYAQKFQG

SEQ ID NO: 330 - protein, 12 aa, Artificial Sequence
  No. 55  HC CDR3
DHIVSPLYGMDV

SEQ ID NO: 331 - protein, 13 aa, Artificial Sequence
  No. 56  LC CDR1
SGSSSNIGNNYVS

SEQ ID NO: 332 - protein, 7 aa, Artificial Sequence
  No. 56  LC CDR2
DNNKRPS

SEQ ID NO: 333 - protein, 11 aa, Artificial Sequence
  No. 56  LC CDR3
QSYDSSLSAWV

SEQ ID NO: 334 - protein, 5 aa, Artificial Sequence
  No. 56  HC CDR1
SNYMS

SEQ ID NO: 335 - protein, 16 aa, Artificial Sequence
  No. 56  HC CDR2
VIYPGGSTFFADSVQG

SEQ ID NO: 336 - protein, 14 aa, Artificial Sequence
  No. 56  HC CDR3
SYDFLTDYTDAFDI

SEQ ID NO: 337 - protein, 11 aa, Artificial Sequence
  No. 57  LC CDR1
RASQGISNYLA

SEQ ID NO: 338 - protein, 7 aa, Artificial Sequence
  No. 57  LC CDR2
DASNLET

SEQ ID NO: 339 - protein, 9 aa, Artificial Sequence
  No. 57  LC CDR3
QQYYSTPIT

SEQ ID NO: 340 - protein, 5 aa, Artificial Sequence
  No. 57  HC CDR1
DYYIQ

SEQ ID NO: 341 - protein, 17 aa, Artificial Sequence
  No. 57  HC CDR2
WINPNSGDTNYAHKFQG

SEQ ID NO: 342 - protein, 13 aa, Artificial Sequence
  No. 57  HC CDR3
GGSYYNVMYWFDP

SEQ ID NO: 343 - protein, 14 aa, Artificial Sequence
  No. 58  LC CDR1
TGTSSDVGGYSHVS

SEQ ID NO: 344 - protein, 7 aa, Artificial Sequence
  No. 58  LC CDR2
EVSDRPS

SEQ ID NO: 345 - protein, 10 aa, Artificial Sequence
  No. 58  LC CDR3
NSYTSSSTWV

SEQ ID NO: 346 - protein, 7 aa, Artificial Sequence
  No. 58  HC CDR1
SSSYYWG

SEQ ID NO: 347 - protein, 16 aa, Artificial Sequence
  No. 58  HC CDR2
NIFYSGSTYYNPSLKS

SEQ ID NO: 348 - protein, 19 aa, Artificial Sequence
  No. 58  HC CDR3
GSRGYYDILTGYSTGGFDY

SEQ ID NO: 349 - protein, 11 aa, Artificial Sequence
  No. 59  LC CDR1
RASQSVSSNLA

SEQ ID NO: 350 - protein, 7 aa, Artificial Sequence
  No. 59  LC CDR2
DASTRAT

SEQ ID NO: 351 - protein, 9 aa, Artificial Sequence
  No. 59  LC CDR3
QQYNNWPLT

SEQ ID NO: 352 - protein, 7 aa, Artificial Sequence
  No. 59  HC CDR1
GSSYYWG

SEQ ID NO: 353 - protein, 16 aa, Artificial Sequence
  No. 59  HC CDR2
NIFYSGSTYYNPSLKS

SEQ ID NO: 354 - protein, 19 aa, Artificial Sequence
  No. 59  HC CDR3
GSRGYYDILTGYSTGGFDY

SEQ ID NO: 355 - protein, 11 aa, Artificial Sequence
  No. 60  LC CDR1
RASQSVSSYLA

SEQ ID NO: 356 - protein, 7 aa, Artificial Sequence
  No. 60  LC CDR2
DASNRAT

SEQ ID NO: 357 - protein, 11 aa, Artificial Sequence
  No. 60  LC CDR3
QQRSNWPPALT

SEQ ID NO: 358 - protein, 5 aa, Artificial Sequence
  No. 60  HC CDR1
SYAII

SEQ ID NO: 359 - protein, 17 aa, Artificial Sequence
  No. 60  HC CDR2
GIIPIFGTANYAQKFQG

SEQ ID NO: 360 - protein, 13 aa, Artificial Sequence
  No. 60  HC CDR3
VTGYDSSGYYQDY

SEQ ID NO: 361 - protein, 12 aa, Artificial Sequence
  No. 61  LC CDR1
GGNNIGSKSVHW

SEQ ID NO: 362 - protein, 7 aa, Artificial Sequence
  No. 61  LC CDR2
DDSDRPS

SEQ ID NO: 363 - protein, 11 aa, Artificial Sequence
  No. 61  LC CDR3
QVWDSSSDRVV

SEQ ID NO: 364 - protein, 5 aa, Artificial Sequence
  No. 61  HC CDR1
DYAMH

SEQ ID NO: 365 - protein, 17 aa, Artificial Sequence
  No. 61  HC CDR2
GTTWNSGTIGYADSVKG

SEQ ID NO: 366 - protein, 13 aa, Artificial Sequence
  No. 61  HC CDR3
DIGSGDRPDAFHL

SEQ ID NO: 367 - protein, 13 aa, Artificial Sequence
  No. 62  LC CDR1
SGSSSNIENNYVS

SEQ ID NO: 368 - protein, 7 aa, Artificial Sequence
  No. 62  LC CDR2
DNNKRPS

SEQ ID NO: 369 - protein, 11 aa, Artificial Sequence
  No. 62  LC CDR3
GTWDNSLSAWV

SEQ ID NO: 370 - protein, 5 aa, Artificial Sequence
  No. 62  HC CDR1
SYYMH

SEQ ID NO: 371 - protein, 17 aa, Artificial Sequence
  No. 62  HC CDR2
IINRSGGSTIYAQTFQG

SEQ ID NO: 372 - protein, 8 aa, Artificial Sequence
  No. 62  HC CDR3
GGRHSLDV

SEQ ID NO: 373 - protein, 12 aa, Artificial Sequence
  No. 63  LC CDR1
RASQSVSSSYLA

SEQ ID NO: 374 - protein, 7 aa, Artificial Sequence
  No. 63  LC CDR2
GASSRAT

SEQ ID NO: 375 - protein, 9 aa, Artificial Sequence
  No. 63  LC CDR3
QQYGSSPYT

SEQ ID NO: 376 - protein, 5 aa, Artificial Sequence
  No. 63  HC CDR1
SSPMH

SEQ ID NO: 377 - protein, 17 aa, Artificial Sequence
  No. 63  HC CDR2
VISYGGSNKYYADSVKG

SEQ ID NO: 378 - protein, 12 aa, Artificial Sequence
  No. 63  HC CDR3
EIALNNYYGMDV

SEQ ID NO: 379 - protein, 14 aa, Artificial Sequence
  No. 64  LC CDR1
TGNRSDIGGYNSLS

SEQ ID NO: 380 - protein, 7 aa, Artificial Sequence
  No. 64  LC CDR2
DVNNRPS

SEQ ID NO: 381 - protein, 10 aa, Artificial Sequence
  No. 64  LC CDR3
NSYTSKNTWV

SEQ ID NO: 382 - protein, 5 aa, Artificial Sequence
  No. 64  HC CDR1
SSPMH

SEQ ID NO: 383 - protein, 17 aa, Artificial Sequence
  No. 64  HC CDR2
VISYDGSNKYYADSVKG

SEQ ID NO: 384 - protein, 12 aa, Artificial Sequence
  No. 64  HC CDR3
EIALNNYYGMDV

SEQ ID NO: 385 - protein, 12 aa, Artificial Sequence
  No. 65  LC CDR1
RASQSVSSSYLA

SEQ ID NO: 386 - protein, 7 aa, Artificial Sequence
  No. 65  LC CDR2
GASSRAT

SEQ ID NO: 387 - protein, 9 aa, Artificial Sequence
  No. 65  LC CDR3
QQYGSSPFT

SEQ ID NO: 388 - protein, 5 aa, Artificial Sequence
  No. 65  HC CDR1
SSPMH

SEQ ID NO: 389 - protein, 17 aa, Artificial Sequence
  No. 65  HC CDR2
VISYDGSNKYYADSVKG

SEQ ID NO: 390 - protein, 12 aa, Artificial Sequence
  No. 65  HC CDR3
EIALNNYYGMDV

SEQ ID NO: 391 - protein, 14 aa, Artificial Sequence
  No. 66  LC CDR1
TGTSSDVGGYNYVS

SEQ ID NO: 392 - protein, 7 aa, Artificial Sequence
  No. 66  LC CDR2
DVSNRPS

SEQ ID NO: 393 - protein, 10 aa, Artificial Sequence
  No. 66  LC CDR3
SSYTSSSTWV

SEQ ID NO: 394 - protein, 5 aa, Artificial Sequence
  No. 66  HC CDR1
SSPMH

SEQ ID NO: 395 - protein, 17 aa, Artificial Sequence
  No. 66  HC CDR2
VISYDGSNKYYADSVKG

SEQ ID NO: 396 - protein, 12 aa, Artificial Sequence
  No. 66  HC CDR3
EIALNNYYGMDV

SEQ ID NO: 397 - protein, 12 aa, Artificial Sequence
  No. 67  LC CDR1
RASQSVSSSYLA

SEQ ID NO: 398 - protein, 7 aa, Artificial Sequence
  No. 67  LC CDR2
GASSRAT

SEQ ID NO: 399 - protein, 10 aa, Artificial Sequence
  No. 67  LC CDR3
QQYGSSPALT

SEQ ID NO: 400 - protein, 5 aa, Artificial Sequence
  No. 67  HC CDR1
SSPMH

SEQ ID NO: 401 - protein, 17 aa, Artificial Sequence
  No. 67  HC CDR2
VISYDGSNKYYADSVKG

SEQ ID NO: 402 - protein, 12 aa, Artificial Sequence
  No. 67  HC CDR3
EIALNNYYGMDV

SEQ ID NO: 403 - protein, 13 aa, Artificial Sequence
  No. 68  LC CDR1
SGSSSNIGNNYVS

SEQ ID NO: 404 - protein, 7 aa, Artificial Sequence
  No. 68  LC CDR2
DNNKRPS

SEQ ID NO: 405 - protein, 11 aa, Artificial Sequence
  No. 68  LC CDR3
GTWDSSLSAWV

SEQ ID NO: 406 - protein, 5 aa, Artificial Sequence
  No. 68  HC CDR1
RKVIA

SEQ ID NO: 407 - protein, 17 aa, Artificial Sequence
  No. 68  HC CDR2
GHAPFVRKPTYARKFQG

SEQ ID NO: 408 - protein, 11 aa, Artificial Sequence
  No. 68  HC CDR3
KAVTTYSGFDN

SEQ ID NO: 409 - protein, 14 aa, Artificial Sequence
  No. 69  LC CDR1
TGTSSDVGGYNNVS

SEQ ID NO: 410 - protein, 7 aa, Artificial Sequence
  No. 69  LC CDR2
DVSKRPS

SEQ ID NO: 411 - protein, 10 aa, Artificial Sequence
  No. 69  LC CDR3
SSYTSSSPWV

SEQ ID NO: 412 - protein, 5 aa, Artificial Sequence
  No. 69  HC CDR1
SYAIS

SEQ ID NO: 413 - protein, 17 aa, Artificial Sequence
  No. 69  HC CDR2
GIIPMFGTTNYAQKFQG

SEQ ID NO: 414 - protein, 17 aa, Artificial Sequence
  No. 69  HC CDR3
DPTSRSTYYYYSGSYYP

SEQ ID NO: 415 - protein, 14 aa, Artificial Sequence
  No. 70  LC CDR1
TGTSTDVGGYNYVS

SEQ ID NO: 416 - protein, 7 aa, Artificial Sequence
  No. 70  LC CDR2
DVSKRPS

SEQ ID NO: 417 - protein, 10 aa, Artificial Sequence
  No. 70  LC CDR3
SSYTSSSTLV

SEQ ID NO: 418 - protein, 5 aa, Artificial Sequence
  No. 70  HC CDR1
NYGMH

SEQ ID NO: 419 - protein, 17 aa, Artificial Sequence
  No. 70  HC CDR2
VMSYDGSNKYYADSVKG

SEQ ID NO: 420 - protein, 11 aa, Artificial Sequence
  No. 70  HC CDR3
PDDSSGYYPDY

SEQ ID NO: 421 - protein, 14 aa, Artificial Sequence
  No. 71  LC CDR1
TGTSSDVGGYNYVS

SEQ ID NO: 422 - protein, 7 aa, Artificial Sequence
  No. 71  LC CDR2
DVSKRPS

SEQ ID NO: 423 - protein, 10 aa, Artificial Sequence
  No. 71  LC CDR3
SSYTSSRTWV

SEQ ID NO: 424 - protein, 5 aa, Artificial Sequence
  No. 71  HC CDR1
GYAMH

SEQ ID NO: 425 - protein, 17 aa, Artificial Sequence
  No. 71  HC CDR2
VISYDGSHKNYADSVKG

SEQ ID NO: 426 - protein, 13 aa, Artificial Sequence
  No. 71  HC CDR3
DNCGGDCGGGMDV

SEQ ID NO: 427 - protein, 13 aa, Artificial Sequence
  No. 72  LC CDR1
SGSSSNIGSNAVN

SEQ ID NO: 428 - protein, 7 aa, Artificial Sequence
  No. 72  LC CDR2
SNSYRPS

SEQ ID NO: 429 - protein, 11 aa, Artificial Sequence
  No. 72  LC CDR3
QSYDSALRGPL

SEQ ID NO: 430 - protein, 5 aa, Artificial Sequence
  No. 72  HC CDR1
SYGIS

SEQ ID NO: 431 - protein, 17 aa, Artificial Sequence
  No. 72  HC CDR2
GIIPILATTKFAQKFQG

SEQ ID NO: 432 - protein, 16 aa, Artificial Sequence
  No. 72  HC CDR3
GWGLRLFGEFSVWFDP

SEQ ID NO: 433 - protein, 14 aa, Artificial Sequence
  No. 73  LC CDR1
TGSSSNIGAGYDVH

SEQ ID NO: 434 - protein, 7 aa, Artificial Sequence
  No. 73  LC CDR2
GNSNRPS

SEQ ID NO: 435 - protein, 11 aa, Artificial Sequence
  No. 73  LC CDR3
QSYDSSLSDVV

SEQ ID NO: 436 - protein, 5 aa, Artificial Sequence
  No. 73  HC CDR1
SYGIS

SEQ ID NO: 437 - protein, 17 aa, Artificial Sequence
  No. 73  HC CDR2
GIIPILATTKFAQKFQG

SEQ ID NO: 438 - protein, 16 aa, Artificial Sequence
  No. 73  HC CDR3
GWGLRLFGEFSVWFDP

SEQ ID NO: 439 - protein, 14 aa, Artificial Sequence
  No. 74  LC CDR1
TGTSSDVGGYNYVS

SEQ ID NO: 440 - protein, 7 aa, Artificial Sequence
  No. 74  LC CDR2
DVSKRPS

SEQ ID NO: 441 - protein, 10 aa, Artificial Sequence
  No. 74  LC CDR3
SSYTSSSTWV

SEQ ID NO: 442 - protein, 5 aa, Artificial Sequence
  No. 74  HC CDR1
SYAMH

SEQ ID NO: 443 - protein, 17 aa, Artificial Sequence
  No. 74  HC CDR2
VISYDGSHKNYADSVKG

SEQ ID NO: 444 - protein, 13 aa, Artificial Sequence
  No. 74  HC CDR3
DNCGGDCGGGMDV

SEQ ID NO: 445 - protein, 14 aa, Artificial Sequence
  No. 75  LC CDR1
SSSTGAVTRGHFPN

SEQ ID NO: 446 - protein, 7 aa, Artificial Sequence
  No. 75  LC CDR2
STSNKHS

SEQ ID NO: 447 - protein, 11 aa, Artificial Sequence
  No. 75  LC CDR3
LLYDAGAPGWV

SEQ ID NO: 448 - protein, 5 aa, Artificial Sequence
  No. 75  HC CDR1
SYPMH

SEQ ID NO: 449 - protein, 17 aa, Artificial Sequence
  No. 75  HC CDR2
VISYDGSLKYYVDSVKG

SEQ ID NO: 450 - protein, 12 aa, Artificial Sequence
  No. 75  HC CDR3
DSSCSGGSCFDY

SEQ ID NO: 451 - protein, 13 aa, Artificial Sequence
  No. 76 LC CDR1
SGSSSNIGSNTVN

SEQ ID NO: 452 - protein, 7 aa, Artificial Sequence
  No. 76 LC CDR2
GNSNRPS

SEQ ID NO: 453 - protein, 11 aa, Artificial Sequence
  No. 76 LC CDR3
QSYDSSLSGVV

SEQ ID NO: 454 - protein, 5 aa, Artificial Sequence
  No. 76  HC CDR1
SYGIS

SEQ ID NO: 455 - protein, 17 aa, Artificial Sequence
  No. 76  HC CDR2
GIIPILATTKFAQKFQG

SEQ ID NO: 456 - protein, 16 aa, Artificial Sequence
  No. 76  HC CDR3
GWGLRLFGEFSVWFDP

SEQ ID NO: 457 - protein, 13 aa, Artificial Sequence
  No. 77  LC CDR1
SGSSSNIGNNYVS

SEQ ID NO: 458 - protein, 7 aa, Artificial Sequence
  No. 77  LC CDR2
DNNKRPS

SEQ ID NO: 459 - protein, 13 aa, Artificial Sequence
  No. 77  LC CDR3
GAWDSSLSTPNWV

SEQ ID NO: 460 - protein, 5 aa, Artificial Sequence
  No. 77  HC CDR1
SYPMH

SEQ ID NO: 461 - protein, 17 aa, Artificial Sequence
  No. 77  HC CDR2
VISYDGSLKYYVDSVKG

SEQ ID NO: 462 - protein, 12 aa, Artificial Sequence
  No. 77  HC CDR3
DSSCSGGSCFDY

SEQ ID NO: 463 - protein, 13 aa, Artificial Sequence
  No. 78  LC CDR1
SGSSSNIGNNYVS

SEQ ID NO: 464 - protein, 7 aa, Artificial Sequence
  No. 78  LC CDR2
DNNKRPS

SEQ ID NO: 465 - protein, 11 aa, Artificial Sequence
  No. 78  LC CDR3
GTWDSSLSAGV

SEQ ID NO: 466 - protein, 5 aa, Artificial Sequence
  No. 78  HC CDR1
SNWIA

SEQ ID NO: 467 - protein, 17 aa, Artificial Sequence
  No. 78  HC CDR2
IIYPGDSDTRNSPSFQG

SEQ ID NO: 468 - protein, 18 aa, Artificial Sequence
  No. 78  HC CDR3
LAYFHPQRNGGYEYYFDY

SEQ ID NO: 469 - protein, 14 aa, Artificial Sequence
  No. 79  LC CDR1
TGSSSNIGAGYDVH

SEQ ID NO: 470 - protein, 7 aa, Artificial Sequence
  No. 79  LC CDR2
GNSNRPS

SEQ ID NO: 471 - protein, 11 aa, Artificial Sequence
  No. 79  LC CDR3
QSYDSRLRAVV

SEQ ID NO: 472 - protein, 5 aa, Artificial Sequence
  No. 79  HC CDR1
TQYLH

SEQ ID NO: 473 - protein, 17 aa, Artificial Sequence
  No. 79  HC CDR2
IINPYGGSTTYAQKFQG

SEQ ID NO: 474 - protein, 16 aa, Artificial Sequence
  No. 79  HC CDR3
SPSGYYGDYEGDAFDI

SEQ ID NO: 475 - protein, 13 aa, Artificial Sequence
  No. 80  LC CDR1
SGSSSNIGNNYVS

SEQ ID NO: 476 - protein, 7 aa, Artificial Sequence
  No. 80  LC CDR2
DNNKRPS

SEQ ID NO: 477 - protein, 11 aa, Artificial Sequence
  No. 80  LC CDR3
GTWDSSLSAVV

SEQ ID NO: 478 - protein, 5 aa, Artificial Sequence
  No. 80  HC CDR1
SYVIS

SEQ ID NO: 479 - protein, 17 aa, Artificial Sequence
  No. 80  HC CDR2
RIIPIFGTVKYAQKFQG

SEQ ID NO: 480 - protein, 17 aa, Artificial Sequence
  No. 80  HC CDR3
DLPGDSRDGYNYDAFDI

SEQ ID NO: 481 - protein, 13 aa, Artificial Sequence
  No. 81  LC CDR1
SGSSSNIGSNTVN

SEQ ID NO: 482 - protein, 7 aa, Artificial Sequence
  No. 81  LC CDR2
SNNQRPS

SEQ ID NO: 483 - protein, 11 aa, Artificial Sequence
  No. 81  LC CDR3
AAWDDSLNGWV

SEQ ID NO: 484 - protein, 5 aa, Artificial Sequence
  No. 81 HC CDR1
SFAMH

SEQ ID NO: 485 - protein, 17 aa, Artificial Sequence
  No. 81 HC CDR2
VISFDGSNKYYADSVKG

SEQ ID NO: 486 - protein, 18 aa, Artificial Sequence
  No. 81 HC CDR3
GDYYGSGSYYNPSPFFDY

SEQ ID NO: 487 - protein, 13 aa, Artificial Sequence
  No. 82 LC CDR1
SGSSSNIGSNYVY

SEQ ID NO: 488 - protein, 7 aa, Artificial Sequence
  No. 82 LC CDR2
RNNQRPS

SEQ ID NO: 489 - protein, 11 aa, Artificial Sequence
  No. 82 LC CDR3
AAWDDSLSGRV

SEQ ID NO: 490 - protein, 5 aa, Artificial Sequence
  No. 82 HC CDR1
SYAIS

SEQ ID NO: 491 - protein, 17 aa, Artificial Sequence
  No. 82 HC CDR2
GIIPIFGTANYAQKFQG

SEQ ID NO: 492 - protein, 22 aa, Artificial Sequence
  No. 82 HC CDR3
DGVVVPAVMYDTTDPYYYGMDV

SEQ ID NO: 493 - protein, 13 aa, Artificial Sequence
  No. 83 LC CDR1
SGSSSNIGSNTVN

SEQ ID NO: 494 - protein, 7 aa, Artificial Sequence
  No. 83 LC CDR2
NNNQRPS

SEQ ID NO: 495 - protein, 11 aa, Artificial Sequence
  No. 83 LC CDR3
AAWDDSLNGVV

SEQ ID NO: 496 - protein, 5 aa, Artificial Sequence
  No. 83 HC CDR1
SYWIG

SEQ ID NO: 497 - protein, 17 aa, Artificial Sequence
  No. 83 HC CDR2
IIYPGDSDTRYSPSFQG

SEQ ID NO: 498 - protein, 10 aa, Artificial Sequence
  No. 83 HC CDR3
GPNIYNWFDS

SEQ ID NO: 499 - protein, 11 aa, Artificial Sequence
  No. 84 LC CDR1
RASQSVSSYLA

SEQ ID NO: 500 - protein, 7 aa, Artificial Sequence
  No. 84 LC CDR2
DASNRAT

SEQ ID NO: 501 - protein, 11 aa, Artificial Sequence
  No. 84 LC CDR3
QQRRNWPPVLT

SEQ ID NO: 502 - protein, 5 aa, Artificial Sequence
  No. 84 HC CDR1
SYAIS

SEQ ID NO: 503 - protein, 17 aa, Artificial Sequence
  No. 84 HC CDR2
GIIPIFGTANYAQKFQG

SEQ ID NO: 504 - protein, 13 aa, Artificial Sequence
  No. 84 HC CDR3
VEGYDSSGYYLDY

SEQ ID NO: 505 - protein, 13 aa, Artificial Sequence
  No. 85 LC CDR1
SGSSSNIGNNYVS

SEQ ID NO: 506 - protein, 7 aa, Artificial Sequence
  No. 85 LC CDR2
DNNKRPS

SEQ ID NO: 507 - protein, 11 aa, Artificial Sequence
  No. 85 LC CDR3
GTWDSSLSAGV

SEQ ID NO: 508 - protein, 5 aa, Artificial Sequence
  No. 85 HC CDR1
DYGMH

SEQ ID NO: 509 - protein, 17 aa, Artificial Sequence
  No. 85 HC CDR2
AISYDGSNKYYADSVKG

SEQ ID NO: 510 - protein, 19 aa, Artificial Sequence
  No. 85 HC CDR3
DSGLYGSGWSTYQYYAMDV

SEQ ID NO: 511 - protein, 11 aa, Artificial Sequence
  No. 86 LC CDR1
RASQSVSTFLA

SEQ ID NO: 512 - protein, 7 aa, Artificial Sequence
  No. 86 LC CDR2
DASNRAT

SEQ ID NO: 513 - protein, 11 aa, Artificial Sequence
  No. 86 LC CDR3
QQRSNWPPRIT

SEQ ID NO: 514 - protein, 5 aa, Artificial Sequence
  No. 86 HC CDR1
SYAIS

SEQ ID NO: 515 - protein, 17 aa, Artificial Sequence
  No. 86 HC CDR2
GIIPIFGTANYAQKFQG

SEQ ID NO: 516 - protein, 13 aa, Artificial Sequence
  No. 86 HC CDR3
VTGYDSSGYYQDY

SEQ ID NO: 517 - protein, 11 aa, Artificial Sequence
  No. 87 LC CDR1
RASQSISSYLN

SEQ ID NO: 518 - protein, 7 aa, Artificial Sequence
  No. 87 LC CDR2
AASSLQS

SEQ ID NO: 519 - protein, 9 aa, Artificial Sequence
  No. 87 LC CDR3
QQSYSTPFT

SEQ ID NO: 520 - protein, 5 aa, Artificial Sequence
  No. 87 HC CDR1
SYAMH

SEQ ID NO: 521 - protein, 17 aa, Artificial Sequence
  No. 87 HC CDR2
VISYDGINKYYADSVKG

SEQ ID NO: 522 - protein, 12 aa, Artificial Sequence
  No. 87 HC CDR3
ALGGNYYYGMDV

SEQ ID NO: 523 - protein, 11 aa, Artificial Sequence
  No. 88 LC CDR1
RASQSVSSYLA

SEQ ID NO: 524 - protein, 7 aa, Artificial Sequence
  No. 88 LC CDR2
DASNRAT

SEQ ID NO: 525 - protein, 11 aa, Artificial Sequence
  No. 88 LC CDR3
QQRSNWPPKYT

SEQ ID NO: 526 - protein, 5 aa, Artificial Sequence
  No. 88 HC CDR1
SYAIS

SEQ ID NO: 527 - protein, 17 aa, Artificial Sequence
  No. 88 HC CDR2
GIIPIFGTANYAQKFQG

SEQ ID NO: 528 - protein, 13 aa, Artificial Sequence
  No. 88 HC CDR3
VTGYDSSGYYQEY

SEQ ID NO: 529 - protein, 11 aa, Artificial Sequence
  No. 89 LC CDR1
RASQSISSYLN

SEQ ID NO: 530 - protein, 7 aa, Artificial Sequence
  No. 89 LC CDR2
KASSLES

SEQ ID NO: 531 - protein, 8 aa, Artificial Sequence
  No. 89 LC CDR3
QQSYSTWT

SEQ ID NO: 532 - protein, 5 aa, Artificial Sequence
  No. 89 HC CDR1
SYAMH

SEQ ID NO: 533 - protein, 17 aa, Artificial Sequence
  No. 89 HC CDR2
VISYDGSNKYYADSVKG

SEQ ID NO: 534 - protein, 12 aa, Artificial Sequence
  No. 89 HC CDR3
ARGGSYLYGMDV

SEQ ID NO: 535 - protein, 11 aa, Artificial Sequence
  No. 90 LC CDR1
RASQSVSSYLA

SEQ ID NO: 536 - protein, 7 aa, Artificial Sequence
  No. 90 LC CDR2
DASNRAT

SEQ ID NO: 537 - protein, 11 aa, Artificial Sequence
  No. 90 LC CDR3
QQRRNWPPRIT

SEQ ID NO: 538 - protein, 5 aa, Artificial Sequence
  No. 90 HC CDR1
SYAIS

SEQ ID NO: 539 - protein, 17 aa, Artificial Sequence
  No. 90 HC CDR2
GIIPIFGTANYAQKFQG

SEQ ID NO: 540 - protein, 13 aa, Artificial Sequence
  No. 90 HC CDR3
VEGYDSSGYYLDY

SEQ ID NO: 541 - protein, 13 aa, Artificial Sequence
  No. 91 LC CDR1
SGSSSNIGNSYVS

SEQ ID NO: 542 - protein, 7 aa, Artificial Sequence
  No. 91 LC CDR2
DNNKRPS

SEQ ID NO: 543 - protein, 11 aa, Artificial Sequence
  No. 91 LC CDR3
GTWDSSLSAWV

SEQ ID NO: 544 - protein, 5 aa, Artificial Sequence
  No. 91 HC CDR1
SYYMH

SEQ ID NO: 545 - protein, 17 aa, Artificial Sequence
  No. 91 HC CDR2
IINRSGGSTIYAQTFQG

SEQ ID NO: 546 - protein, 8 aa, Artificial Sequence
  No. 91 HC CDR3
GGRHSLDV

SEQ ID NO: 547 - protein, 14 aa, Artificial Sequence
  No. 92 LC CDR1
TGSSSNIGAGYDVH

SEQ ID NO: 548 - protein, 7 aa, Artificial Sequence
  No. 92 LC CDR2
GNSNRPS

SEQ ID NO: 549 - protein, 11 aa, Artificial Sequence
  No. 92 LC CDR3
AAWDDSLGGPV

SEQ ID NO: 550 - protein, 5 aa, Artificial Sequence
  No. 92 HC CDR1
TYGMH

SEQ ID NO: 551 - protein, 17 aa, Artificial Sequence
  No. 92 HC CDR2
VISYDGFNKYYADSVKG

SEQ ID NO: 552 - protein, 12 aa, Artificial Sequence
  No. 92 HC CDR3
SLGGNYYYGMDV

SEQ ID NO: 553 - protein, 11 aa, Artificial Sequence
  No. 93 LC CDR1
RASQSVSSFLA

SEQ ID NO: 554 - protein, 7 aa, Artificial Sequence
  No. 93 LC CDR2
DASNRAT

SEQ ID NO: 555 - protein, 11 aa, Artificial Sequence
  No. 93 LC CDR3
QQRSNWPPKLT

SEQ ID NO: 556 - protein, 5 aa, Artificial Sequence
  No. 93 HC CDR1
SYAIS

SEQ ID NO: 557 - protein, 17 aa, Artificial Sequence
  No. 93 HC CDR2
GIIPIFGTANYAQKFQG

SEQ ID NO: 558 - protein, 13 aa, Artificial Sequence
  No. 93 HC CDR3
VSGYDSSGYYQDY

SEQ ID NO: 559 - protein, 13 aa, Artificial Sequence
  No. 94 LC CDR1
SGSSSNIGSNTVN

SEQ ID NO: 560 - protein, 7 aa, Artificial Sequence
  No. 94 LC CDR2
SNNQRPS

SEQ ID NO: 561 - protein, 11 aa, Artificial Sequence
  No. 94 LC CDR3
AAWDDSLNGWV

SEQ ID NO: 562 - protein, 5 aa, Artificial Sequence
  No. 94 HC CDR1
TYGMH

SEQ ID NO: 563 - protein, 17 aa, Artificial Sequence
  No. 94 HC CDR2
VISYDGFNKYYADSVKG

SEQ ID NO: 564 - protein, 12 aa, Artificial Sequence
  No. 94 HC CDR3
SLGGNYYYGMDV

SEQ ID NO: 565 - protein, 13 aa, Artificial Sequence
  No. 95 LC CDR1
SGSSSNIGSNTVS

SEQ ID NO: 566 - protein, 7 aa, Artificial Sequence
  No. 95 LC CDR2
SNNQRPS

SEQ ID NO: 567 - protein, 11 aa, Artificial Sequence
  No. 95 LC CDR3
AAWDDSLNGVV

SEQ ID NO: 568 - protein, 5 aa, Artificial Sequence
  No. 95 HC CDR1
GYYWS

SEQ ID NO: 569 - protein, 16 aa, Artificial Sequence
  No. 95 HC CDR2
EINHSGSTNYNPSLKS

SEQ ID NO: 570 - protein, 20 aa, Artificial Sequence
  No. 95 HC CDR3
GRYSSNWYEAWTPRGIGMDV

SEQ ID NO: 571 - protein, 11 aa, Artificial Sequence
  No. 96 LC CDR1
RASQSISSYLN

SEQ ID NO: 572 - protein, 7 aa, Artificial Sequence
  No. 96 LC CDR2
AASSLQS

SEQ ID NO: 573 - protein, 8 aa, Artificial Sequence
  No. 96 LC CDR3
QQSYSTWT

SEQ ID NO: 574 - protein, 5 aa, Artificial Sequence
  No. 96 HC CDR1
SYAMH

SEQ ID NO: 575 - protein, 17 aa, Artificial Sequence
  No. 96 HC CDR2
VISYDGINKYYADSVKG

SEQ ID NO: 576 - protein, 12 aa, Artificial Sequence
  No. 96 HC CDR3
ALGGNYYYGMDV

SEQ ID NO: 577 - protein, 11 aa, Artificial Sequence
  No. 97 LC CDR1
QASQDISSYLN

SEQ ID NO: 578 - protein, 7 aa, Artificial Sequence
  No. 97 LC CDR2
AASSLQS

SEQ ID NO: 579 - protein, 8 aa, Artificial Sequence
  No. 97 LC CDR3
QQSYSTWT

SEQ ID NO: 580 - protein, 5 aa, Artificial Sequence
  No. 97 HC CDR1
SYAMH

SEQ ID NO: 581 - protein, 17 aa, Artificial Sequence
  No. 97 HC CDR2
VISYDGSNKYYADSVKG

SEQ ID NO: 582 - protein, 12 aa, Artificial Sequence
  No. 97 HC CDR3
ARGGSYLYGMDV

SEQ ID NO: 583 - protein, 11 aa, Artificial Sequence
  No. 98 LC CDR1
RASQSISSYLN

SEQ ID NO: 584 - protein, 7 aa, Artificial Sequence
  No. 98 LC CDR2
AASSLQS

SEQ ID NO: 585 - protein, 9 aa, Artificial Sequence
  No. 98 LC CDR3
QQSYSNPFT

SEQ ID NO: 586 - protein, 5 aa, Artificial Sequence
  No. 98 HC CDR1
SYAMH

SEQ ID NO: 587 - protein, 17 aa, Artificial Sequence
  No. 98 HC CDR2
VISYDGINKYYADSVKG

SEQ ID NO: 588 - protein, 12 aa, Artificial Sequence
  No. 98 HC CDR3
ALGGNYYYGMDV

SEQ ID NO: 589 - protein, 11 aa, Artificial Sequence
  No. 99 LC CDR1
RASQSVSSYLA

SEQ ID NO: 590 - protein, 7 aa, Artificial Sequence
  No. 99 LC CDR2
DASNRAT

SEQ ID NO: 591 - protein, 11 aa, Artificial Sequence
  No. 99 LC CDR3
QQRSNWPPMYT

SEQ ID NO: 592 - protein, 5 aa, Artificial Sequence
  No. 99 HC CDR1
SYAII

SEQ ID NO: 593 - protein, 17 aa, Artificial Sequence
  No. 99 HC CDR2
GIIPIFGTANYAQKFQG

SEQ ID NO: 594 - protein, 13 aa, Artificial Sequence
  No. 99 HC CDR3
VTGYDSSGYYQDY

SEQ ID NO: 595 - protein, 13 aa, Artificial Sequence
  No. 100 LC CDR1
TGSRSNIGINSVN

SEQ ID NO: 596 - protein, 7 aa, Artificial Sequence
  No. 100 LC CDR2
SNNQRPS

SEQ ID NO: 597 - protein, 11 aa, Artificial Sequence
  No. 100 LC CDR3
AAWDDSLNGYV

SEQ ID NO: 598 - protein, 5 aa, Artificial Sequence
  No. 100 HC CDR1
GYYWS

SEQ ID NO: 599 - protein, 16 aa, Artificial Sequence
  No. 100 HC CDR2
EINHSGSTNYNPSLKS

SEQ ID NO: 600 - protein, 20 aa, Artificial Sequence
  No. 100 HC CDR3
GRYSSNWYEAWTPRGIGMDV

SEQ ID NO: 601 - protein, 14 aa, Artificial Sequence
  No. 101 LC CDR1
TGTSSDIGGYNYVS

SEQ ID NO: 602 - protein, 7 aa, Artificial Sequence
  No. 101 LC CDR2
AVSKRPS

SEQ ID NO: 603 - protein, 12 aa, Artificial Sequence
  No. 101 LC CDR3
SSYTSSSGTLNV

SEQ ID NO: 604 - protein, 5 aa, Artificial Sequence
  No. 101 HC CDR1
TYGMH

SEQ ID NO: 605 - protein, 17 aa, Artificial Sequence
  No. 101 HC CDR2
VISYDGFNKYYADSVKG

SEQ ID NO: 606 - protein, 12 aa, Artificial Sequence
  No. 101 HC CDR3
SLGGNYYYGMDV

SEQ ID NO: 607 - protein, 13 aa, Artificial Sequence
  No. 102 LC CDR1
SGSNSNIGNNFVS

SEQ ID NO: 608 - protein, 7 aa, Artificial Sequence
  No. 102 LC CDR2
DNNVRPS

SEQ ID NO: 609 - protein, 11 aa, Artificial Sequence
  No. 102 LC CDR3
AAWDTSLSSWV

SEQ ID NO: 610 - protein, 5 aa, Artificial Sequence
  No. 102 HC CDR1
SYYMH

SEQ ID NO: 611 - protein, 17 aa, Artificial Sequence
  No. 102 HC CDR2
IINRSGGSTIYAQTFQG

SEQ ID NO: 612 - protein, 8 aa, Artificial Sequence
  No. 102 HC CDR3
GGRHSLDV

SEQ ID NO: 613 - protein, 11 aa, Artificial Sequence
  No. 103 LC CDR1
RASQSISSWLA

SEQ ID NO: 614 - protein, 7 aa, Artificial Sequence
  No. 103 LC CDR2
RASTLQS

SEQ ID NO: 615 - protein, 9 aa, Artificial Sequence
  No. 103 LC CDR3
QQYKTYPLT

SEQ ID NO: 616 - protein, 5 aa, Artificial Sequence
  No. 103 HC CDR1
SYGMH

SEQ ID NO: 617 - protein, 17 aa, Artificial Sequence
  No. 103 HC CDR2
AIWHDGYNKYYADSVKG

SEQ ID NO: 618 - protein, 7 aa, Artificial Sequence
  No. 103 HC CDR3
GSKAADY

SEQ ID NO: 619 - protein, 11 aa, Artificial Sequence
  No.104 LC CDR1
GGNNIGSKSVH

SEQ ID NO: 620 - protein, 7 aa, Artificial Sequence
  No.104 LC CDR2
QDSKRPS

SEQ ID NO: 621 - protein, 8 aa, Artificial Sequence
  No.104 LC CDR3
QAWDSSTV

SEQ ID NO: 622 - protein, 5 aa, Artificial Sequence
  No.104 HC CDR1
TYGMH

SEQ ID NO: 623 - protein, 17 aa, Artificial Sequence
  No.104 HC CDR2
VISYDGFNKYYADSVKG

SEQ ID NO: 624 - protein, 12 aa, Artificial Sequence
  No.104 HC CDR3
SLGGNYYYGMDV

SEQ ID NO: 625 - protein, 11 aa, Artificial Sequence
  No.105 LC CDR1
RASQSVSSYLA

SEQ ID NO: 626 - protein, 7 aa, Artificial Sequence
  No.105 LC CDR2
DASNRAT

SEQ ID NO: 627 - protein, 11 aa, Artificial Sequence
  No.105 LC CDR3
QQRSNWPPMYT

SEQ ID NO: 628 - protein, 5 aa, Artificial Sequence
  No.105 HC CDR1
SYAIS

SEQ ID NO: 629 - protein, 17 aa, Artificial Sequence
  No.105 HC CDR2
GIIPIFGTANYAQKFQG

SEQ ID NO: 630 - protein, 13 aa, Artificial Sequence
  No.105 HC CDR3
VTGYDSSGYYQEY

SEQ ID NO: 631 - protein, 14 aa, Artificial Sequence
  No.106 LC CDR1
TGTSSDVGGYNYVS

SEQ ID NO: 632 - protein, 7 aa, Artificial Sequence
  No.106 LC CDR2
DVSNRPS

SEQ ID NO: 633 - protein, 11 aa, Artificial Sequence
  No.106 LC CDR3
SSYTSSSTRYV

SEQ ID NO: 634 - protein, 5 aa, Artificial Sequence
  No.106 HC CDR1
SYAMN

SEQ ID NO: 635 - protein, 17 aa, Artificial Sequence
  No.106 HC CDR2
AISGSGGTTYYADSVKG

SEQ ID NO: 636 - protein, 20 aa, Artificial Sequence
  No.106 HC CDR3
APSDLSFIWTGYYSEYYFDY

SEQ ID NO: 637 - protein, 14 aa, Artificial Sequence
  No.107 LC CDR1
TGSSSNIGAGYDVH

SEQ ID NO: 638 - protein, 7 aa, Artificial Sequence
  No.107 LC CDR2
GNSNRPS

SEQ ID NO: 639 - protein, 11 aa, Artificial Sequence
  No.107 LC CDR3
QSYDSSLSGWV

SEQ ID NO: 640 - protein, 5 aa, Artificial Sequence
  No.107 HC CDR1
NYGIS

SEQ ID NO: 641 - protein, 17 aa, Artificial Sequence
  No.107 HC CDR2
WISAYNGNTNYAQKLQG

SEQ ID NO: 642 - protein, 15 aa, Artificial Sequence
  No.107 HC CDR3
PRGYSGYGSNWYFDL

SEQ ID NO: 643 - protein, 11 aa, Artificial Sequence
  No. 108 LC CDR1
RASQSVSSFLA

SEQ ID NO: 644 - protein, 7 aa, Artificial Sequence
  No. 108 LC CDR2
DASNRAT

SEQ ID NO: 645 - protein, 11 aa, Artificial Sequence
  No. 108 LC CDR3
QQRSNWPPALT

SEQ ID NO: 646 - protein, 5 aa, Artificial Sequence
  No. 108 HC CDR1
SYAIS

SEQ ID NO: 647 - protein, 17 aa, Artificial Sequence
  No. 108 HC CDR2
GIIPIFGTANYAQKFQG

SEQ ID NO: 648 - protein, 13 aa, Artificial Sequence
  No. 108 HC CDR3
VTGYDSSGYYQDY

SEQ ID NO: 649 - protein, 11 aa, Artificial Sequence
  No. 109 LC CDR1
RTTQNINTYLN

SEQ ID NO: 650 - protein, 7 aa, Artificial Sequence
  No. 109 LC CDR2
AASRLQS

SEQ ID NO: 651 - protein, 9 aa, Artificial Sequence
  No. 109 LC CDR3
QRSYSTPYT

SEQ ID NO: 652 - protein, 5 aa, Artificial Sequence
  No. 109 HC CDR1
SYAMH

SEQ ID NO: 653 - protein, 17 aa, Artificial Sequence
  No. 109 HC CDR2
LISYDGNNKYYADSVKG

SEQ ID NO: 654 - protein, 12 aa, Artificial Sequence
  No. 109 HC CDR3
ATYGSYYYGMDA

SEQ ID NO: 655 - protein, 13 aa, Artificial Sequence
  No. 110 LC CDR1
SGSSSNIGSNTVN

SEQ ID NO: 656 - protein, 7 aa, Artificial Sequence
  No. 110 LC CDR2
SNNQRPS

SEQ ID NO: 657 - protein, 11 aa, Artificial Sequence
  No. 110 LC CDR3
AAWDDSLNGWV

SEQ ID NO: 658 - protein, 5 aa, Artificial Sequence
  No. 110 HC CDR1
NYAMN

SEQ ID NO: 659 - protein, 17 aa, Artificial Sequence
  No. 110 HC CDR2
TISGSGGSTYYADSVKG

SEQ ID NO: 660 - protein, 6 aa, Artificial Sequence
  No. 110 HC CDR3
GYALNP

SEQ ID NO: 661 - protein, 13 aa, Artificial Sequence
  No. 111 LC CDR1
SGSSSNIGSNYVS

SEQ ID NO: 662 - protein, 7 aa, Artificial Sequence
  No. 111 LC CDR2
DNNKRPS

SEQ ID NO: 663 - protein, 11 aa, Artificial Sequence
  No. 111 LC CDR3
GTWDSSLSAWV

SEQ ID NO: 664 - protein, 5 aa, Artificial Sequence
  No. 111 HC CDR1
SYYMH

SEQ ID NO: 665 - protein, 17 aa, Artificial Sequence
  No. 111 HC CDR2
IINRSGGSTIYAQTFQG

SEQ ID NO: 666 - protein, 8 aa, Artificial Sequence
  No. 111 HC CDR3
GGRHSLDV

SEQ ID NO: 667 - protein, 13 aa, Artificial Sequence
  No. 112 LC CDR1
SGSSSNIGNNYVS

SEQ ID NO: 668 - protein, 7 aa, Artificial Sequence
  No. 112 LC CDR2
DNNKRPS

SEQ ID NO: 669 - protein, 11 aa, Artificial Sequence
  No. 112 LC CDR3
GTWDSSLSAYV

SEQ ID NO: 670 - protein, 5 aa, Artificial Sequence
  No. 112 HC CDR1
SYYMH

SEQ ID NO: 671 - protein, 17 aa, Artificial Sequence
  No. 112 HC CDR2
IINRSGGSTIYAQTFQG

SEQ ID NO: 672 - protein, 8 aa, Artificial Sequence
  No. 112 HC CDR3
GGRHSLDV

SEQ ID NO: 673 - protein, 13 aa, Artificial Sequence
  No. 113 LC CDR1
SGSSSNIGNNYVS

SEQ ID NO: 674 - protein, 7 aa, Artificial Sequence
  No. 113 LC CDR2
DNSRRPS

SEQ ID NO: 675 - protein, 11 aa, Artificial Sequence
  No. 113 LC CDR3
GTWDSSLSAWV

SEQ ID NO: 676 - protein, 5 aa, Artificial Sequence
  No. 113 HC CDR1
SYYMH

SEQ ID NO: 677 - protein, 17 aa, Artificial Sequence
  No. 113 HC CDR2
IINRSGGSTIYAQTFQG

SEQ ID NO: 678 - protein, 8 aa, Artificial Sequence
  No. 113 HC CDR3
GGRHSLDV

SEQ ID NO: 679 - protein, 13 aa, Artificial Sequence
  No. 114 LC CDR1
SGSSSNIGNNYVS

SEQ ID NO: 680 - protein, 7 aa, Artificial Sequence
  No. 114 LC CDR2
RNNQRPS

SEQ ID NO: 681 - protein, 11 aa, Artificial Sequence
  No. 114 LC CDR3
AAWDDSLSAWV

SEQ ID NO: 682 - protein, 5 aa, Artificial Sequence
  No. 114 HC CDR1
SYYMH

SEQ ID NO: 683 - protein, 17 aa, Artificial Sequence
  No. 114 HC CDR2
IINRSGGSTIYAQTFQG

SEQ ID NO: 684 - protein, 8 aa, Artificial Sequence
  No. 114 HC CDR3
GGRHSLDV

SEQ ID NO: 685 - protein, 13 aa, Artificial Sequence
  No. 115 LC CDR1
SGSSSNIGNNYVS

SEQ ID NO: 686 - protein, 7 aa, Artificial Sequence
  No. 115 LC CDR2
DNNKRPS

SEQ ID NO: 687 - protein, 12 aa, Artificial Sequence
  No. 115 LC CDR3
GTWDSSLSAYWV

SEQ ID NO: 688 - protein, 5 aa, Artificial Sequence
  No. 115 HC CDR1
SYYMH

SEQ ID NO: 689 - protein, 17 aa, Artificial Sequence
  No. 115 HC CDR2
IINRSGGSTIYAQTFQG

SEQ ID NO: 690 - protein, 8 aa, Artificial Sequence
  No. 115 HC CDR3
GGRHSLDV

SEQ ID NO: 691 - protein, 13 aa, Artificial Sequence
  No. 116 LC CDR1
SGSSSNIGNNYVS

SEQ ID NO: 692 - protein, 7 aa, Artificial Sequence
  No. 116 LC CDR2
DNNKRPS

SEQ ID NO: 693 - protein, 11 aa, Artificial Sequence
  No. 116 LC CDR3
GTWDSSLSAWV

SEQ ID NO: 694 - protein, 5 aa, Artificial Sequence
  No. 116 HC CDR1
SYYMH

SEQ ID NO: 695 - protein, 17 aa, Artificial Sequence
  No. 116 HC CDR2
IINRSGGSTIYAQTFQS

SEQ ID NO: 696 - protein, 8 aa, Artificial Sequence
  No. 116 HC CDR3
GGRHSLDV

SEQ ID NO: 697 - protein, 13 aa, Artificial Sequence
  No. 117 LC CDR1
SGSSSNIGNNYVS

SEQ ID NO: 698 - protein, 7 aa, Artificial Sequence
  No. 117 LC CDR2
DNNKRPS

SEQ ID NO: 699 - protein, 11 aa, Artificial Sequence
  No. 117 LC CDR3
AAWDDSLNGPV

SEQ ID NO: 700 - protein, 5 aa, Artificial Sequence
  No. 117 HC CDR1
RYAMS

SEQ ID NO: 701 - protein, 17 aa, Artificial Sequence
  No. 117 HC CDR2
AISGSGGSTYYADSVKG

SEQ ID NO: 702 - protein, 15 aa, Artificial Sequence
  No. 117 HC CDR3
VRYYDFWSGWDVMDV

SEQ ID NO: 703 - protein, 13 aa, Artificial Sequence
  No. 118 LC CDR1
SGSSSSIGNNYVS

SEQ ID NO: 704 - protein, 7 aa, Artificial Sequence
  No. 118 LC CDR2
DNNKRPS

SEQ ID NO: 705 - protein, 11 aa, Artificial Sequence
  No. 118 LC CDR3
GTWDSSLSAWV

SEQ ID NO: 706 - protein, 5 aa, Artificial Sequence
  No. 118 HC CDR1
SYYMH

SEQ ID NO: 707 - protein, 17 aa, Artificial Sequence
  No. 118 HC CDR2
IINRSGGSTIYAQTFQG

SEQ ID NO: 708 - protein, 8 aa, Artificial Sequence
  No. 118 HC CDR3
GGRHSLDV

SEQ ID NO: 709 - protein, 13 aa, Artificial Sequence
  No. 119 LC CDR1
SGSSSNIGNNYVS

SEQ ID NO: 710 - protein, 7 aa, Artificial Sequence
  No. 119 LC CDR2
DNNVRPS

SEQ ID NO: 711 - protein, 11 aa, Artificial Sequence
  No. 119 LC CDR3
AAWDTSLSSWV

SEQ ID NO: 712 - protein, 5 aa, Artificial Sequence
  No. 119 HC CDR1
SYYMH

SEQ ID NO: 713 - protein, 17 aa, Artificial Sequence
  No. 119 HC CDR2
IINRSGGSTIYAQTFQG

SEQ ID NO: 714 - protein, 8 aa, Artificial Sequence
  No. 119 HC CDR3
GGRHSLDV

SEQ ID NO: 715 - protein, 13 aa, Artificial Sequence
  No. 120 LC CDR1
SGSSSNIGNNYVS

SEQ ID NO: 716 - protein, 7 aa, Artificial Sequence
  No. 120 LC CDR2
DNNQRPS

SEQ ID NO: 717 - protein, 11 aa, Artificial Sequence
  No. 120 LC CDR3
GTWDTSLSAWV

SEQ ID NO: 718 - protein, 5 aa, Artificial Sequence
  No. 120 HC CDR1
SYYMH

SEQ ID NO: 719 - protein, 17 aa, Artificial Sequence
  No. 120 HC CDR2
IINRSGGSTIYAQTFQG

SEQ ID NO: 720 - protein, 8 aa, Artificial Sequence
  No. 120 HC CDR3
GGRHSLDV

SEQ ID NO: 721 - protein, 13 aa, Artificial Sequence
  No. 121 LC CDR1
SGSSSNIGRNYVS

SEQ ID NO: 722 - protein, 7 aa, Artificial Sequence
  No. 121 LC CDR2
DNNRRPS

SEQ ID NO: 723 - protein, 11 aa, Artificial Sequence
  No. 121 LC CDR3
GTWDSSLSAVA

SEQ ID NO: 724 - protein, 5 aa, Artificial Sequence
  No. 121 HC CDR1
SYYMH

SEQ ID NO: 725 - protein, 17 aa, Artificial Sequence
  No. 121 HC CDR2
IINPSGGSTSYAQKFQG

SEQ ID NO: 726 - protein, 8 aa, Artificial Sequence
  No. 121 HC CDR3
GGDHGMDV

SEQ ID NO: 727 - protein, 13 aa, Artificial Sequence
  No. 122 LC CDR1
SGSSSNIGSNTVN

SEQ ID NO: 728 - protein, 7 aa, Artificial Sequence
  No. 122 LC CDR2
SNNQRPS

SEQ ID NO: 729 - protein, 11 aa, Artificial Sequence
  No. 122 LC CDR3
AAWDDSLNGTV

SEQ ID NO: 730 - protein, 5 aa, Artificial Sequence
  No. 122 HC CDR1
GYYWS

SEQ ID NO: 731 - protein, 16 aa, Artificial Sequence
  No. 122 HC CDR2
EINHSGSTNYNPSLKS

SEQ ID NO: 732 - protein, 20 aa, Artificial Sequence
  No. 122 HC CDR3
GRYSSNWYEAWTPRGIGMDV

SEQ ID NO: 733 - protein, 11 aa, Artificial Sequence
  No. 123 LC CDR1
SGDVLAKKYAR

SEQ ID NO: 734 - protein, 7 aa, Artificial Sequence
  No. 123 LC CDR2
KDSERPS

SEQ ID NO: 735 - protein, 9 aa, Artificial Sequence
  No. 123 LC CDR3
YSAADNNGV

SEQ ID NO: 736 - protein, 5 aa, Artificial Sequence
  No. 123 HC CDR1
SDAMH

SEQ ID NO: 737 - protein, 17 aa, Artificial Sequence
  No. 123 HC CDR2
VISYDGSNKYYADSVKG

SEQ ID NO: 738 - protein, 18 aa, Artificial Sequence
  No. 123 HC CDR3
EATYDSSGRPTGDYGMDV

SEQ ID NO: 739 - protein, 11 aa, Artificial Sequence
  No. 124 LC CDR1
RASQSVSSYLA

SEQ ID NO: 740 - protein, 7 aa, Artificial Sequence
  No. 124 LC CDR2
DASNRAT

SEQ ID NO: 741 - protein, 11 aa, Artificial Sequence
  No. 124 LC CDR3
QQRSNWPPRIT

SEQ ID NO: 742 - protein, 5 aa, Artificial Sequence
  No. 124 HC CDR1
SYAIS

SEQ ID NO: 743 - protein, 17 aa, Artificial Sequence
  No. 124 HC CDR2
GIIPIFGTANYAQKFQG

SEQ ID NO: 744 - protein, 13 aa, Artificial Sequence
  No. 124 HC CDR3
VTGYDGSGYYQDY

SEQ ID NO: 745 - protein, 13 aa, Artificial Sequence
  No. 125 LC CDR1
SGSNSNIGSNTVN

SEQ ID NO: 746 - protein, 7 aa, Artificial Sequence
  No. 125 LC CDR2
SNNQRPS

SEQ ID NO: 747 - protein, 11 aa, Artificial Sequence
  No. 125 LC CDR3
AAWDDSLNGYV

SEQ ID NO: 748 - protein, 5 aa, Artificial Sequence
  No. 125 HC CDR1
GYYWS

SEQ ID NO: 749 - protein, 16 aa, Artificial Sequence
  No. 125 HC CDR2
EINHSGSTNYNPSLKS

SEQ ID NO: 750 - protein, 16 aa, Artificial Sequence
  No. 125 HC CDR3
GRYYSSWYGPRTWFDP

SEQ ID NO: 751 - protein, 11 aa, Artificial Sequence
  No. 126 LC CDR1
RASQSVSTYLS

SEQ ID NO: 752 - protein, 7 aa, Artificial Sequence
  No. 126 LC CDR2
DASNRAT

SEQ ID NO: 753 - protein, 11 aa, Artificial Sequence
  No. 126 LC CDR3
LQRSNWPPALT

SEQ ID NO: 754 - protein, 5 aa, Artificial Sequence
  No. 126 HC CDR1
SYAIS

SEQ ID NO: 755 - protein, 17 aa, Artificial Sequence
  No. 126 HC CDR2
GIIPIFGTANYAQKFQG

SEQ ID NO: 756 - protein, 13 aa, Artificial Sequence
  No. 126 HC CDR3
ASGYDSSGYYSDY

SEQ ID NO: 757 - protein, 11 aa, Artificial Sequence
  No. 127 LC CDR1
RASQSVSSFLA

SEQ ID NO: 758 - protein, 7 aa, Artificial Sequence
  No. 127 LC CDR2
DASNRAT

SEQ ID NO: 759 - protein, 11 aa, Artificial Sequence
  No. 127 LC CDR3
QQRSNWPPSIT

SEQ ID NO: 760 - protein, 5 aa, Artificial Sequence
  No. 127 HC CDR1
SYAIS

SEQ ID NO: 761 - protein, 17 aa, Artificial Sequence
  No. 127 HC CDR2
GIIPIFGTANYAQKFQG

SEQ ID NO: 762 - protein, 13 aa, Artificial Sequence
  No. 127 HC CDR3
VGTYDSSGYSFDY

SEQ ID NO: 763 - protein, 13 aa, Artificial Sequence
  No. 128 LC CDR1
SGSSSNIGNNYVS

SEQ ID NO: 764 - protein, 7 aa, Artificial Sequence
  No. 128 LC CDR2
DNNKRPS

SEQ ID NO: 765 - protein, 11 aa, Artificial Sequence
  No. 128 LC CDR3
AAWDDSLNGVV

SEQ ID NO: 766 - protein, 5 aa, Artificial Sequence
  No. 128 HC CDR1
RYAMS

SEQ ID NO: 767 - protein, 17 aa, Artificial Sequence
  No. 128 HC CDR2
AISGSGGSTYYADSVKG

SEQ ID NO: 768 - protein, 15 aa, Artificial Sequence
  No. 128 HC CDR3
GPRGQDYGDYGFLDY

SEQ ID NO: 769 - protein, 13 aa, Artificial Sequence
  No. 129 LC CDR1
SGSSSNIGSNTVD

SEQ ID NO: 770 - protein, 7 aa, Artificial Sequence
  No. 129 LC CDR2
NNNQRPS

SEQ ID NO: 771 - protein, 12 aa, Artificial Sequence
  No. 129 LC CDR3
AAWDDSLNAPWV

SEQ ID NO: 772 - protein, 5 aa, Artificial Sequence
  No. 129 HC CDR1
SYAMH

SEQ ID NO: 773 - protein, 17 aa, Artificial Sequence
  No. 129 HC CDR2
VISYDGSNKYYADSVKG

SEQ ID NO: 774 - protein, 12 aa, Artificial Sequence
  No. 129 HC CDR3
PRGGNYRGALDI

SEQ ID NO: 775 - protein, 11 aa, Artificial Sequence
  No. 130 LC CDR1
RASQSVSSYLA

SEQ ID NO: 776 - protein, 7 aa, Artificial Sequence
  No. 130 LC CDR2
DASNRAT

SEQ ID NO: 777 - protein, 10 aa, Artificial Sequence
  No. 130 LC CDR3
QQYGSSPPIT

SEQ ID NO: 778 - protein, 5 aa, Artificial Sequence
  No. 130 HC CDR1
SYAIS

SEQ ID NO: 779 - protein, 17 aa, Artificial Sequence
  No. 130 HC CDR2
GIIPIFGTTNYAQKFQG

SEQ ID NO: 780 - protein, 12 aa, Artificial Sequence
  No. 130 HC CDR3
DPTGWYSGYFDY

SEQ ID NO: 781 - protein, 14 aa, Artificial Sequence
  No. 131 LC CDR1
TGTSSDVGSYNLVS

SEQ ID NO: 782 - protein, 7 aa, Artificial Sequence
  No. 131 LC CDR2
DVSNRPS

SEQ ID NO: 783 - protein, 10 aa, Artificial Sequence
  No. 131 LC CDR3
SSYTSSSTLV

SEQ ID NO: 784 - protein, 5 aa, Artificial Sequence
  No. 131 HC CDR1
NYGMH

SEQ ID NO: 785 - protein, 17 aa, Artificial Sequence
  No. 131 HC CDR2
VMSYDGSNKYYADSVKG

SEQ ID NO: 786 - protein, 11 aa, Artificial Sequence
  No. 131 HC CDR3
PDDSSGYYPDY

SEQ ID NO: 787 - protein, 14 aa, Artificial Sequence
  No. 132 LC CDR1
TGTSSDVGGYNYVS

SEQ ID NO: 788 - protein, 7 aa, Artificial Sequence
  No. 132 LC CDR2
DVSKRPS

SEQ ID NO: 789 - protein, 10 aa, Artificial Sequence
  No. 132 LC CDR3
SSYTTSSTWV

SEQ ID NO: 790 - protein, 5 aa, Artificial Sequence
  No. 132 HC CDR1
ELSIH

SEQ ID NO: 791 - protein, 17 aa, Artificial Sequence
  No. 132 HC CDR2
GFDPEDAETIYAQKFQG

SEQ ID NO: 792 - protein, 12 aa, Artificial Sequence
  No. 132 HC CDR3
SPAVTTAGWFDP

SEQ ID NO: 793 - protein, 14 aa, Artificial Sequence
  No. 133 LC CDR1
TGTRGDIGAYDGVS

SEQ ID NO: 794 - protein, 7 aa, Artificial Sequence
  No. 133 LC CDR2
AVTQRPS

SEQ ID NO: 795 - protein, 10 aa, Artificial Sequence
  No. 133 LC CDR3
SSYTSSSSWV

SEQ ID NO: 796 - protein, 5 aa, Artificial Sequence
  No. 133 HC CDR1
ELSMH

SEQ ID NO: 797 - protein, 17 aa, Artificial Sequence
  No. 133 HC CDR2
GFDPEDGETIYAQKFQG

SEQ ID NO: 798 - protein, 12 aa, Artificial Sequence
  No. 133 HC CDR3
SPAIIRVDWFDP

SEQ ID NO: 799 - protein, 14 aa, Artificial Sequence
  No. 134 LC CDR1
TGTRGDIGAYDGVS

SEQ ID NO: 800 - protein, 7 aa, Artificial Sequence
  No. 134 LC CDR2
AVTQRPS

SEQ ID NO: 801 - protein, 10 aa, Artificial Sequence
  No. 134 LC CDR3
SSYTSSSSWV

SEQ ID NO: 802 - protein, 5 aa, Artificial Sequence
  No. 134 HC CDR1
RYAMS

SEQ ID NO: 803 - protein, 17 aa, Artificial Sequence
  No. 134 HC CDR2
AISGSGGSTYYADSVKG

SEQ ID NO: 804 - protein, 15 aa, Artificial Sequence
  No. 134 HC CDR3
GPRGQDYGDYGFLDY

SEQ ID NO: 805 - protein, 14 aa, Artificial Sequence
  No. 135 LC CDR1
SGTSSDVGGYNYVS

SEQ ID NO: 806 - protein, 7 aa, Artificial Sequence
  No. 135 LC CDR2
DVSKRPS

SEQ ID NO: 807 - protein, 10 aa, Artificial Sequence
  No. 135 LC CDR3
SSYTSSSTWV

SEQ ID NO: 808 - protein, 5 aa, Artificial Sequence
  No. 135 HC CDR1
SYAMH

SEQ ID NO: 809 - protein, 17 aa, Artificial Sequence
  No. 135 HC CDR2
VISYDGSHKNYADSVKG

SEQ ID NO: 810 - protein, 13 aa, Artificial Sequence
  No. 135 HC CDR3
DNCGGDCGGGMDV

SEQ ID NO: 811 - protein, 14 aa, Artificial Sequence
  No. 136 LC CDR1
TGTSSDVGGYNYVS

SEQ ID NO: 812 - protein, 7 aa, Artificial Sequence
  No. 136 LC CDR2
DVSKRPS

SEQ ID NO: 813 - protein, 11 aa, Artificial Sequence
  No. 136 LC CDR3
SSYTSSSTPWV

SEQ ID NO: 814 - protein, 5 aa, Artificial Sequence
  No. 136 HC CDR1
SYAMH

SEQ ID NO: 815 - protein, 17 aa, Artificial Sequence
  No. 136 HC CDR2
VISYDGSHKNYADSVKG

SEQ ID NO: 816 - protein, 13 aa, Artificial Sequence
  No. 136 HC CDR3
DNCGGDCGGGMDV

SEQ ID NO: 817 - protein, 14 aa, Artificial Sequence
  No. 137 LC CDR1
TGTNSDVGGYNYVS

SEQ ID NO: 818 - protein, 7 aa, Artificial Sequence
  No. 137 LC CDR2
DVTKRPS

SEQ ID NO: 819 - protein, 10 aa, Artificial Sequence
  No. 137 LC CDR3
SSYTSSSTWV

SEQ ID NO: 820 - protein, 5 aa, Artificial Sequence
  No. 137 HC CDR1
SYAMH

SEQ ID NO: 821 - protein, 17 aa, Artificial Sequence
  No. 137 HC CDR2
VISYDGSHKNYADSVKG

SEQ ID NO: 822 - protein, 13 aa, Artificial Sequence
  No. 137 HC CDR3
DNCGGDCGGGMDV

SEQ ID NO: 823 - protein, 14 aa, Artificial Sequence
  No. 138 LC CDR1
TGTSTDIGRYNYVS

SEQ ID NO: 824 - protein, 7 aa, Artificial Sequence
  No. 138 LC CDR2
DVSKRPS

SEQ ID NO: 825 - protein, 10 aa, Artificial Sequence
  No. 138 LC CDR3
SSYTSSSTYA

SEQ ID NO: 826 - protein, 5 aa, Artificial Sequence
  No. 138 HC CDR1
EVAIH

SEQ ID NO: 827 - protein, 17 aa, Artificial Sequence
  No. 138 HC CDR2
GFDPEDGETSYAQKFQG

SEQ ID NO: 828 - protein, 14 aa, Artificial Sequence
  No. 138 HC CDR3
GPVLGLSKWLEFDP

SEQ ID NO: 829 - protein, 14 aa, Artificial Sequence
  No. 139 LC CDR1
TGTSSDVGAYNYVS

SEQ ID NO: 830 - protein, 7 aa, Artificial Sequence
  No. 139 LC CDR2
DVSKRPS

SEQ ID NO: 831 - protein, 10 aa, Artificial Sequence
  No. 139 LC CDR3
NSYTSSSTWV

SEQ ID NO: 832 - protein, 5 aa, Artificial Sequence
  No. 139 HC CDR1
EVAIH

SEQ ID NO: 833 - protein, 17 aa, Artificial Sequence
  No. 139 HC CDR2
GFDPEDGETSYAQKFQG

SEQ ID NO: 834 - protein, 14 aa, Artificial Sequence
  No. 139 HC CDR3
GPVLGLSKWLEFDP

SEQ ID NO: 835 - protein, 13 aa, Artificial Sequence
  No. 140 LC CDR1
SGSSSNIGNNYVS

SEQ ID NO: 836 - protein, 7 aa, Artificial Sequence
  No. 140 LC CDR2
DNNKRPS

SEQ ID NO: 837 - protein, 11 aa, Artificial Sequence
  No. 140 LC CDR3
GTWDSSLSAVV

SEQ ID NO: 838 - protein, 5 aa, Artificial Sequence
  No. 140 HC CDR1
RYAMS

SEQ ID NO: 839 - protein, 17 aa, Artificial Sequence
  No. 140 HC CDR2
AISGSGGSTYYADSVKG

SEQ ID NO: 840 - protein, 15 aa, Artificial Sequence
  No. 140 HC CDR3
GPRGQDYGDYGFLDY

SEQ ID NO: 841 - protein, 13 aa, Artificial Sequence
  No. 141 LC CDR1
SGSSSNIGNNYVS

SEQ ID NO: 842 - protein, 7 aa, Artificial Sequence
  No. 141 LC CDR2
DNNKRPS

SEQ ID NO: 843 - protein, 11 aa, Artificial Sequence
  No. 141 LC CDR3
EAWDSSLSAVL

SEQ ID NO: 844 - protein, 5 aa, Artificial Sequence
  No. 141 HC CDR1
RYAMS

SEQ ID NO: 845 - protein, 17 aa, Artificial Sequence
  No. 141 HC CDR2
AISGSGGSTYYADSVKG

SEQ ID NO: 846 - protein, 15 aa, Artificial Sequence
  No. 141 HC CDR3
GPRGQDYGDYGFLDY

SEQ ID NO: 847 - protein, 13 aa, Artificial Sequence
  No. 142 LC CDR1
SGSSSNIGNNYVS

SEQ ID NO: 848 - protein, 7 aa, Artificial Sequence
  No. 142 LC CDR2
DNNKRPS

SEQ ID NO: 849 - protein, 11 aa, Artificial Sequence
  No. 142 LC CDR3
GTWDTSLSAGV

SEQ ID NO: 850 - protein, 5 aa, Artificial Sequence
  No. 142 HC CDR1
RYAMS

SEQ ID NO: 851 - protein, 17 aa, Artificial Sequence
  No. 142 HC CDR2
AISGSGGSTYYADSVKG

SEQ ID NO: 852 - protein, 15 aa, Artificial Sequence
  No. 142 HC CDR3
GPRGQDYGDYGFLDY

SEQ ID NO: 853 - protein, 13 aa, Artificial Sequence
  No. 143 LC CDR1
SGSSSNIGNNYVS

SEQ ID NO: 854 - protein, 7 aa, Artificial Sequence
  No. 143 LC CDR2
DNNKRPS

SEQ ID NO: 855 - protein, 11 aa, Artificial Sequence
  No. 143 LC CDR3
GTWDSSLSDVV

SEQ ID NO: 856 - protein, 5 aa, Artificial Sequence
  No. 143 HC CDR1
RYAMS

SEQ ID NO: 857 - protein, 17 aa, Artificial Sequence
  No. 143 HC CDR2
AISGSGGSTYYADSVKG

SEQ ID NO: 858 - protein, 15 aa, Artificial Sequence
  No. 143 HC CDR3
GPRGQDYGDYGFLDY

SEQ ID NO: 859 - protein, 13 aa, Artificial Sequence
  No. 144 LC CDR1
SGSSSNIGNNYVS

SEQ ID NO: 860 - protein, 7 aa, Artificial Sequence
  No. 144 LC CDR2
DNNKRPS

SEQ ID NO: 861 - protein, 11 aa, Artificial Sequence
  No. 144 LC CDR3
GTWDSSLSAGV

SEQ ID NO: 862 - protein, 5 aa, Artificial Sequence
  No. 144 HC CDR1
RYAMS

SEQ ID NO: 863 - protein, 17 aa, Artificial Sequence
  No. 144 HC CDR2
AISGSGGSTYYADSVKG

SEQ ID NO: 864 - protein, 15 aa, Artificial Sequence
  No. 144 HC CDR3
GPRGQDYGDYGFLDY

SEQ ID NO: 865 - protein, 13 aa, Artificial Sequence
  No. 145 LC CDR1
CRASQSVSSSYLA

SEQ ID NO: 866 - protein, 7 aa, Artificial Sequence
  No. 145 LC CDR2
GASSRAT

SEQ ID NO: 867 - protein, 9 aa, Artificial Sequence
  No. 145 LC CDR3
QQYGSSPPT

SEQ ID NO: 868 - protein, 5 aa, Artificial Sequence
  No. 145 HC CDR1
NYVIN

SEQ ID NO: 869 - protein, 17 aa, Artificial Sequence
  No. 145 HC CDR2
GFIPVFGIADYAQKFQG

SEQ ID NO: 870 - protein, 19 aa, Artificial Sequence
  No. 145 HC CDR3
SGLFDWLLPRSRHRDYFDY

SEQ ID NO: 871 - protein, 13 aa, Artificial Sequence
  No. 146 LC CDR1
SGSSSNIGNNYVS

SEQ ID NO: 872 - protein, 7 aa, Artificial Sequence
  No. 146 LC CDR2
DNNKRPS

SEQ ID NO: 873 - protein, 11 aa, Artificial Sequence
  No. 146 LC CDR3
AAWDDSLNGWV

SEQ ID NO: 874 - protein, 5 aa, Artificial Sequence
  No. 146 HC CDR1
SYAIS

SEQ ID NO: 875 - protein, 17 aa, Artificial Sequence
  No. 146 HC CDR2
GIIPMFGTTNYAQKFQG

SEQ ID NO: 876 - protein, 17 aa, Artificial Sequence
  No. 146 HC CDR3
DPTSRSTYYYYSGSYYP

SEQ ID NO: 877 - protein, 13 aa, Artificial Sequence
  No. 147 LC CDR1
SGSGSNIGSNYVH

SEQ ID NO: 878 - protein, 7 aa, Artificial Sequence
  No. 147 LC CDR2
RNSQRPS

SEQ ID NO: 879 - protein, 11 aa, Artificial Sequence
  No. 147 LC CDR3
AAWDDSLSGWV

SEQ ID NO: 880 - protein, 5 aa, Artificial Sequence
  No. 147 HC CDR1
SYAIS

SEQ ID NO: 881 - protein, 17 aa, Artificial Sequence
  No. 147 HC CDR2
GIIPMFGTTNYAQKFQG

SEQ ID NO: 882 - protein, 17 aa, Artificial Sequence
  No. 147 HC CDR3
DPTSRSTYYYYSGSYYP

SEQ ID NO: 883 - protein, 13 aa, Artificial Sequence
  No. 148 LC CDR1
SGSSSNIGSNYVY

SEQ ID NO: 884 - protein, 7 aa, Artificial Sequence
  No. 148 LC CDR2
RNNQRPS

SEQ ID NO: 885 - protein, 11 aa, Artificial Sequence
  No. 148 LC CDR3
AAWDDSLSGWV

SEQ ID NO: 886 - protein, 5 aa, Artificial Sequence
  No. 148 HC CDR1
ELPIH

SEQ ID NO: 887 - protein, 17 aa, Artificial Sequence
  No. 148 HC CDR2
RFDPEDGETIYAQNFQG

SEQ ID NO: 888 - protein, 18 aa, Artificial Sequence
  No. 148 HC CDR3
DLTTVTNPLNYYYYGMDV

SEQ ID NO: 889 - protein, 13 aa, Artificial Sequence
  No. 149 LC CDR1
SGSSSNVGSNYVY

SEQ ID NO: 890 - protein, 7 aa, Artificial Sequence
  No. 149 LC CDR2
RNSQRPS

SEQ ID NO: 891 - protein, 11 aa, Artificial Sequence
  No. 149 LC CDR3
AAWDDSLSGWM

SEQ ID NO: 892 - protein, 5 aa, Artificial Sequence
  No. 149 HC CDR1
SYGTT

SEQ ID NO: 893 - protein, 17 aa, Artificial Sequence
  No. 149 HC CDR2
WISGYNENSTHAQKFQG

SEQ ID NO: 894 - protein, 16 aa, Artificial Sequence
  No. 149 HC CDR3
DALRYDILTGFTGFDY

SEQ ID NO: 895 - protein, 13 aa, Artificial Sequence
  No. 150 LC CDR1
SGSSSNIGSNTVN

SEQ ID NO: 896 - protein, 7 aa, Artificial Sequence
  No. 150 LC CDR2
SNNQRPS

SEQ ID NO: 897 - protein, 11 aa, Artificial Sequence
  No. 150 LC CDR3
AAWDDSLSGPV

SEQ ID NO: 898 - protein, 5 aa, Artificial Sequence
  No. 150 HC CDR1
SYAMS

SEQ ID NO: 899 - protein, 17 aa, Artificial Sequence
  No. 150 HC CDR2
AISGSGGDTYYADSVKG

SEQ ID NO: 900 - protein, 15 aa, Artificial Sequence
  No. 150 HC CDR3
VRYYDFWSGWDVMDV

SEQ ID NO: 901 - protein, 14 aa, Artificial Sequence
  No. 151 LC CDR1
TGSSSNIGAGYDVH

SEQ ID NO: 902 - protein, 7 aa, Artificial Sequence
  No. 151 LC CDR2
SNNQRPS

SEQ ID NO: 903 - protein, 11 aa, Artificial Sequence
  No. 151 LC CDR3
AAWDDSLNGPV

SEQ ID NO: 904 - protein, 5 aa, Artificial Sequence
  No. 151 HC CDR1
SYWMS

SEQ ID NO: 905 - protein, 17 aa, Artificial Sequence
  No. 151 HC CDR2
NIKQDGSEKYYVDSVKG

SEQ ID NO: 906 - protein, 16 aa, Artificial Sequence
  No. 151 HC CDR3
GTYYYDSSGPLNWFDP

SEQ ID NO: 907 - protein, 12 aa, Artificial Sequence
  No. 152 LC CDR1
CRASQSVSSYLA

SEQ ID NO: 908 - protein, 7 aa, Artificial Sequence
  No. 152 LC CDR2
DASNRAT

SEQ ID NO: 909 - protein, 5 aa, Artificial Sequence
  No. 152 LC CDR3
QQGLT

SEQ ID NO: 910 - protein, 5 aa, Artificial Sequence
  No. 152 HC CDR1
SYAIS

SEQ ID NO: 911 - protein, 17 aa, Artificial Sequence
  No. 152 HC CDR2
GIIPFLGTANYAQKFQG

SEQ ID NO: 912 - protein, 17 aa, Artificial Sequence
  No. 152 HC CDR3
GKPYYCTGSTCYQPLGP

SEQ ID NO: 913 - protein, 13 aa, Artificial Sequence
  No. 153 LC CDR1
CRASQSVSSSYLA

SEQ ID NO: 914 - protein, 7 aa, Artificial Sequence
  No. 153 LC CDR2
GASSRAT

SEQ ID NO: 915 - protein, 9 aa, Artificial Sequence
  No. 153 LC CDR3
QQYGSSPYT

SEQ ID NO: 916 - protein, 5 aa, Artificial Sequence
  No. 153 HC CDR1
SSPMH

SEQ ID NO: 917 - protein, 17 aa, Artificial Sequence
  No. 153 HC CDR2
VISYDGSNKYYADSVKG

SEQ ID NO: 918 - protein, 12 aa, Artificial Sequence
  No. 153 HC CDR3
EIALNNYYGMDV

SEQ ID NO: 919 - protein, 14 aa, Artificial Sequence
  No. 154 LC CDR1
TGTSSDVGNYNYVS

SEQ ID NO: 920 - protein, 7 aa, Artificial Sequence
  No. 154 LC CDR2
DVSNRPS

SEQ ID NO: 921 - protein, 10 aa, Artificial Sequence
  No. 154 LC CDR3
SSYTSSGTLV

SEQ ID NO: 922 - protein, 5 aa, Artificial Sequence
  No. 154 HC CDR1
ELSIH

SEQ ID NO: 923 - protein, 17 aa, Artificial Sequence
  No. 154 HC CDR2
GFDPENGETIHAQRFQG

SEQ ID NO: 924 - protein, 12 aa, Artificial Sequence
  No. 154 HC CDR3
STPMIRASWFDP

SEQ ID NO: 925 - protein, 13 aa, Artificial Sequence
  No. 155 LC CDR1
SGSSSNIGSNYVN

SEQ ID NO: 926 - protein, 7 aa, Artificial Sequence
  No. 155 LC CDR2
SNNQRPS

SEQ ID NO: 927 - protein, 11 aa, Artificial Sequence
  No. 155 LC CDR3
ATWDDSLNGQV

SEQ ID NO: 928 - protein, 5 aa, Artificial Sequence
  No. 155 HC CDR1
DYWMS

SEQ ID NO: 929 - protein, 17 aa, Artificial Sequence
  No. 155 HC CDR2
NIKEDGSEKYYVDSVKG

SEQ ID NO: 930 - protein, 6 aa, Artificial Sequence
  No. 155 HC CDR3
GYSGNF

SEQ ID NO: 931 - protein, 13 aa, Artificial Sequence
  No. 156 LC CDR1
SGSSSNIGNNYVS

SEQ ID NO: 932 - protein, 7 aa, Artificial Sequence
  No. 156 LC CDR2
DNNKRPS

SEQ ID NO: 933 - protein, 11 aa, Artificial Sequence
  No. 156 LC CDR3
GTWDSSLSAVV

SEQ ID NO: 934 - protein, 5 aa, Artificial Sequence
  No. 156 HC CDR1
SYAII

SEQ ID NO: 935 - protein, 17 aa, Artificial Sequence
  No. 156 HC CDR2
GIIPIFGTANYAQKFQG

SEQ ID NO: 936 - protein, 13 aa, Artificial Sequence
  No. 156 HC CDR3
VTGYDSSGYYQDY

SEQ ID NO: 937 - protein, 12 aa, Artificial Sequence
  No. 157  LC CDR1
RASQSVGRNYLA

SEQ ID NO: 938 - protein, 7 aa, Artificial Sequence
  No. 157  LC CDR2
DASTRAT

SEQ ID NO: 939 - protein, 9 aa, Artificial Sequence
  No. 157  LC CDR3
QQYGSSPIT

SEQ ID NO: 940 - protein, 7 aa, Artificial Sequence
  No. 157  HC CDR1
SSSYYWG

SEQ ID NO: 941 - protein, 16 aa, Artificial Sequence
  No. 157  HC CDR2
SIYYSGSTYYNPSLKS

SEQ ID NO: 942 - protein, 19 aa, Artificial Sequence
  No. 157  HC CDR3
GSRGYYDFLTGYSTGGFDY

SEQ ID NO: 943 - protein, 11 aa, Artificial Sequence
  No. 158  LC CDR1
RASQSVSSYLA

SEQ ID NO: 944 - protein, 7 aa, Artificial Sequence
  No. 158  LC CDR2
DASNRAT

SEQ ID NO: 945 - protein, 9 aa, Artificial Sequence
  No. 158  LC CDR3
HQYGTSPFT

SEQ ID NO: 946 - protein, 7 aa, Artificial Sequence
  No. 158  HC CDR1
SSSYYWG

SEQ ID NO: 947 - protein, 16 aa, Artificial Sequence
  No. 158  HC CDR2
SIYYSGSTYYNPSLKS

SEQ ID NO: 948 - protein, 19 aa, Artificial Sequence
  No. 158  HC CDR3
GSRGYYDFLTGYSTGGFDY

SEQ ID NO: 949 - protein, 12 aa, Artificial Sequence
  No. 159  LC CDR1
RASQSVSSSYLA

SEQ ID NO: 950 - protein, 7 aa, Artificial Sequence
  No. 159  LC CDR2
GASSRAT

SEQ ID NO: 951 - protein, 9 aa, Artificial Sequence
  No. 159  LC CDR3
QQYGSSPLT

SEQ ID NO: 952 - protein, 7 aa, Artificial Sequence
  No. 159  HC CDR1
SGGYYWS

SEQ ID NO: 953 - protein, 16 aa, Artificial Sequence
  No. 159  HC CDR2
YIYYSGSTYYNPSLKS

SEQ ID NO: 954 - protein, 19 aa, Artificial Sequence
  No. 159  HC CDR3
GSRGYYDFLTGYSTGGFDY

SEQ ID NO: 955 - protein, 12 aa, Artificial Sequence
  No. 160  LC CDR1
RASQSVSSSYLA

SEQ ID NO: 956 - protein, 7 aa, Artificial Sequence
  No. 160  LC CDR2
GASSRAT

SEQ ID NO: 957 - protein, 9 aa, Artificial Sequence
  No. 160  LC CDR3
QQYGSSPLT

SEQ ID NO: 958 - protein, 7 aa, Artificial Sequence
  No. 160  HC CDR1
SSSYYWG

SEQ ID NO: 959 - protein, 16 aa, Artificial Sequence
  No. 160  HC CDR2
SIYYSGSTYYNPSLKS

SEQ ID NO: 960 - protein, 19 aa, Artificial Sequence
  No. 160  HC CDR3
GSRGYYDFLTGYSTGGFDY

SEQ ID NO: 961 - protein, 11 aa, Artificial Sequence
  No. 161  LC CDR1
RASQSVNSYSA

SEQ ID NO: 962 - protein, 7 aa, Artificial Sequence
  No. 161  LC CDR2
DASNRAT

SEQ ID NO: 963 - protein, 9 aa, Artificial Sequence
  No. 161  LC CDR3
QQYHTSPIT

SEQ ID NO: 964 - protein, 7 aa, Artificial Sequence
  No. 161  HC CDR1
SSSYYWG

SEQ ID NO: 965 - protein, 16 aa, Artificial Sequence
  No. 161  HC CDR2
SIYYSGSTYYNPSLKS

SEQ ID NO: 966 - protein, 19 aa, Artificial Sequence
  No. 161  HC CDR3
GSRGYYDFLTGYSTGGFDY

SEQ ID NO: 967 - protein, 11 aa, Artificial Sequence
  No. 162  LC CDR1
RASQSVSSYLA

SEQ ID NO: 968 - protein, 7 aa, Artificial Sequence
  No. 162  LC CDR2
DASNRAT

SEQ ID NO: 969 - protein, 9 aa, Artificial Sequence
  No. 162  LC CDR3
QQYGSSPIT

SEQ ID NO: 970 - protein, 7 aa, Artificial Sequence
  No. 162  HC CDR1
SSSYYWG

SEQ ID NO: 971 - protein, 16 aa, Artificial Sequence
  No. 162  HC CDR2
SIYYSGSTYYNPSLKS

SEQ ID NO: 972 - protein, 19 aa, Artificial Sequence
  No. 162  HC CDR3
GSRGYYDFLTGYSTGGFDY

SEQ ID NO: 973 - protein, 14 aa, Artificial Sequence
  No. 163  LC CDR1
TGTSSNVGDYNYVS

SEQ ID NO: 974 - protein, 7 aa, Artificial Sequence
  No. 163  LC CDR2
DVTNRPS

SEQ ID NO: 975 - protein, 11 aa, Artificial Sequence
  No. 163  LC CDR3
SSYTSGSTPVV

SEQ ID NO: 976 - protein, 7 aa, Artificial Sequence
  No. 163  HC CDR1
SSSYYWG

SEQ ID NO: 977 - protein, 16 aa, Artificial Sequence
  No. 163  HC CDR2
NIFYSGSTYYNPSLKS

SEQ ID NO: 978 - protein, 19 aa, Artificial Sequence
  No. 163  HC CDR3
GSRGYYDILTGYSTGGFDY

SEQ ID NO: 979 - protein, 12 aa, Artificial Sequence
  No. 164  LC CDR1
RASQSVSSSYLA

SEQ ID NO: 980 - protein, 7 aa, Artificial Sequence
  No. 164  LC CDR2
GASSRAT

SEQ ID NO: 981 - protein, 9 aa, Artificial Sequence
  No. 164  LC CDR3
QQYGTSPLT

SEQ ID NO: 982 - protein, 7 aa, Artificial Sequence
  No. 164  HC CDR1
SSSYYWG

SEQ ID NO: 983 - protein, 16 aa, Artificial Sequence
  No. 164  HC CDR2
NIFYSGSTYYNPSLKS

SEQ ID NO: 984 - protein, 19 aa, Artificial Sequence
  No. 164  HC CDR3
GSRGYYDILTGYSTGGFDY

SEQ ID NO: 985 - protein, 12 aa, Artificial Sequence
  No. 165  LC CDR1
RASQSVSSSYLA

SEQ ID NO: 986 - protein, 7 aa, Artificial Sequence
  No. 165  LC CDR2
GASSRAT

SEQ ID NO: 987 - protein, 9 aa, Artificial Sequence
  No. 165  LC CDR3
QQYGSSPLA

SEQ ID NO: 988 - protein, 7 aa, Artificial Sequence
  No. 165  HC CDR1
SSSYYWG

SEQ ID NO: 989 - protein, 16 aa, Artificial Sequence
  No. 165  HC CDR2
NIFYSGSTYYNPSLKS

SEQ ID NO: 990 - protein, 19 aa, Artificial Sequence
  No. 165  HC CDR3
GSRGYYDILTGYSTGGFDY

SEQ ID NO: 991 - protein, 11 aa, Artificial Sequence
  No. 166  LC CDR1
RASQSVSSYLA

SEQ ID NO: 992 - protein, 7 aa, Artificial Sequence
  No. 166  LC CDR2
DASNRAT

SEQ ID NO: 993 - protein, 9 aa, Artificial Sequence
  No. 166  LC CDR3
QQYGSSPQT

SEQ ID NO: 994 - protein, 7 aa, Artificial Sequence
  No. 166  HC CDR1
GSSYYWG

SEQ ID NO: 995 - protein, 16 aa, Artificial Sequence
  No. 166  HC CDR2
NIFYSGSTYYNPSLKS

SEQ ID NO: 996 - protein, 19 aa, Artificial Sequence
  No. 166  HC CDR3
GSRGYYDILTGYSTGGFDY

SEQ ID NO: 997 - protein, 11 aa, Artificial Sequence
  No. 167  LC CDR1
RASQSVRNYLA

SEQ ID NO: 998 - protein, 7 aa, Artificial Sequence
  No. 167  LC CDR2
DASTRAT

SEQ ID NO: 999 - protein, 9 aa, Artificial Sequence
  No. 167  LC CDR3
QQYGRSPLT

SEQ ID NO: 1000 - protein, 7 aa, Artificial Sequence
  No. 167  HC CDR1
GSSYYWG

SEQ ID NO: 1001 - protein, 16 aa, Artificial Sequence
  No. 167  HC CDR2
NIFYSGSTYYNPSLKS

SEQ ID NO: 1002 - protein, 19 aa, Artificial Sequence
  No. 167  HC CDR3
GSRGYYDILTGYSTGGFDY

SEQ ID NO: 1003 - protein, 11 aa, Artificial Sequence
  No. 168  LC CDR1
RASQSVSSYLA

SEQ ID NO: 1004 - protein, 7 aa, Artificial Sequence
  No. 168  LC CDR2
GASSRAT

SEQ ID NO: 1005 - protein, 9 aa, Artificial Sequence
  No. 168  LC CDR3
QQHGSSPFT

SEQ ID NO: 1006 - protein, 7 aa, Artificial Sequence
  No. 168  HC CDR1
GSSYYWG

SEQ ID NO: 1007 - protein, 16 aa, Artificial Sequence
  No. 168  HC CDR2
NIFYSGSTYYNPSLKS

SEQ ID NO: 1008 - protein, 19 aa, Artificial Sequence
  No. 168  HC CDR3
GSRGYYDILTGYSTGGFDY

SEQ ID NO: 1009 - protein, 13 aa, Artificial Sequence
  No. 169  LC CDR1
SGSSSNIGSNYVY

SEQ ID NO: 1010 - protein, 7 aa, Artificial Sequence
  No. 169  LC CDR2
RNNQRPS

SEQ ID NO: 1011 - protein, 11 aa, Artificial Sequence
  No. 169  LC CDR3
AAWDDSLSGKV

SEQ ID NO: 1012 - protein, 5 aa, Artificial Sequence
  No. 169  HC CDR1
SYAIS

SEQ ID NO: 1013 - protein, 17 aa, Artificial Sequence
  No. 169  HC CDR2
GIIPIFGTANYAQKFQG

SEQ ID NO: 1014 - protein, 22 aa, Artificial Sequence
  No. 169  HC CDR3
DGVVVPAVMYDTTDPYYYGMDV

SEQ ID NO: 1015 - protein, 13 aa, Artificial Sequence
  No. 170  LC CDR1
SGSSSNIGSNTVN

SEQ ID NO: 1016 - protein, 7 aa, Artificial Sequence
  No. 170  LC CDR2
SNNQRPS

SEQ ID NO: 1017 - protein, 11 aa, Artificial Sequence
  No. 170  LC CDR3
STWDDSLSGRV

SEQ ID NO: 1018 - protein, 5 aa, Artificial Sequence
  No. 170  HC CDR1
SYAIS

SEQ ID NO: 1019 - protein, 17 aa, Artificial Sequence
  No. 170  HC CDR2
GIIPIFGTANYAQKFQG

SEQ ID NO: 1020 - protein, 22 aa, Artificial Sequence
  No. 170  HC CDR3
DGVVVPAVMYDTTDPYYYGMDV

SEQ ID NO: 1021 - protein, 13 aa, Artificial Sequence
  No. 171  LC CDR1
SGLTSNIGSNFVY

SEQ ID NO: 1022 - protein, 7 aa, Artificial Sequence
  No. 171  LC CDR2
RNNERPS

SEQ ID NO: 1023 - protein, 11 aa, Artificial Sequence
  No. 171  LC CDR3
AAWDDTLVGRV

SEQ ID NO: 1024 - protein, 5 aa, Artificial Sequence
  No. 171  HC CDR1
SYAIS

SEQ ID NO: 1025 - protein, 17 aa, Artificial Sequence
  No. 171  HC CDR2
GIIPIFGTANYAQKFQD

SEQ ID NO: 1026 - protein, 22 aa, Artificial Sequence
  No. 171  HC CDR3
DGVVVPAVMYDTTDPYYYGMDV

SEQ ID NO: 1027 - protein, 13 aa, Artificial Sequence
  No. 172  LC CDR1
SGSSSNIGSNTVN

SEQ ID NO: 1028 - protein, 7 aa, Artificial Sequence
  No. 172  LC CDR2
SNNQRPS

SEQ ID NO: 1029 - protein, 11 aa, Artificial Sequence
  No. 172  LC CDR3
AAWDDSLSGPV

SEQ ID NO: 1030 - protein, 5 aa, Artificial Sequence
  No. 172  HC CDR1
SHWIA

SEQ ID NO: 1031 - protein, 17 aa, Artificial Sequence
  No. 172  HC CDR2
IIYPGDSDSRYSPSFQG

SEQ ID NO: 1032 - protein, 10 aa, Artificial Sequence
  No. 172  HC CDR3
GPNLYNWFDS

SEQ ID NO: 1033 - protein, 13 aa, Artificial Sequence
  No. 173  LC CDR1
SGSSSNIGSNTVN

SEQ ID NO: 1034 - protein, 7 aa, Artificial Sequence
  No. 173  LC CDR2
SNNQRPS

SEQ ID NO: 1035 - protein, 11 aa, Artificial Sequence
  No. 173  LC CDR3
AAWDDSLNGPV

SEQ ID NO: 1036 - protein, 5 aa, Artificial Sequence
  No. 173  HC CDR1
SHWIA

SEQ ID NO: 1037 - protein, 17 aa, Artificial Sequence
  No. 173  HC CDR2
IIYPGDSDSRYSPSFQG

SEQ ID NO: 1038 - protein, 10 aa, Artificial Sequence
  No. 173  HC CDR3
GPNLYNWFDS

SEQ ID NO: 1039 - protein, 13 aa, Artificial Sequence
  No. 174  LC CDR1
SGSSSNIGSNTVN

SEQ ID NO: 1040 - protein, 7 aa, Artificial Sequence
  No. 174  LC CDR2
SNNQRPS

SEQ ID NO: 1041 - protein, 12 aa, Artificial Sequence
  No. 174  LC CDR3
AAWDDSLNGSVV

SEQ ID NO: 1042 - protein, 5 aa, Artificial Sequence
  No. 174  HC CDR1
SYWIA

SEQ ID NO: 1043 - protein, 17 aa, Artificial Sequence
  No. 174  HC CDR2
IIYPGDSDTRYSPSFQG

SEQ ID NO: 1044 - protein, 10 aa, Artificial Sequence
  No. 174  HC CDR3
GPNLYNWFDF

SEQ ID NO: 1045 - protein, 13 aa, Artificial Sequence
  No. 175  LC CDR1
SGSSSNIGSNTVN

SEQ ID NO: 1046 - protein, 7 aa, Artificial Sequence
  No. 175  LC CDR2
SNNQRPS

SEQ ID NO: 1047 - protein, 12 aa, Artificial Sequence
  No. 175  LC CDR3
AAWDDSLNGHVV

SEQ ID NO: 1048 - protein, 5 aa, Artificial Sequence
  No. 175  HC CDR1
SYWIA

SEQ ID NO: 1049 - protein, 17 aa, Artificial Sequence
  No. 175  HC CDR2
IIYPGDSDTRYSPSFQG

SEQ ID NO: 1050 - protein, 10 aa, Artificial Sequence
  No. 175  HC CDR3
GPNLYNWFDF

SEQ ID NO: 1051 - protein, 13 aa, Artificial Sequence
  No. 176  LC CDR1
SGSSSNIGSNTVN

SEQ ID NO: 1052 - protein, 7 aa, Artificial Sequence
  No. 176  LC CDR2
SNNQRPS

SEQ ID NO: 1053 - protein, 11 aa, Artificial Sequence
  No. 176  LC CDR3
AAWDDSLNGWV

SEQ ID NO: 1054 - protein, 5 aa, Artificial Sequence
  No. 176  HC CDR1
SHWIA

SEQ ID NO: 1055 - protein, 17 aa, Artificial Sequence
  No. 176  HC CDR2
IIYPGDSDSRYSPSFQG

SEQ ID NO: 1056 - protein, 10 aa, Artificial Sequence
  No. 176  HC CDR3
GPNLYNWFDS

SEQ ID NO: 1057 - protein, 11 aa, Artificial Sequence
  No. 177  LC CDR1
RASQSVSSYLA

SEQ ID NO: 1058 - protein, 7 aa, Artificial Sequence
  No. 177  LC CDR2
DASNRAT

SEQ ID NO: 1059 - protein, 9 aa, Artificial Sequence
  No. 177  LC CDR3
QQYYSTPFT

SEQ ID NO: 1060 - protein, 5 aa, Artificial Sequence
  No. 177  HC CDR1
DYYIQ

SEQ ID NO: 1061 - protein, 17 aa, Artificial Sequence
  No. 177  HC CDR2
WINPNSGDTNYAHKFQG

SEQ ID NO: 1062 - protein, 13 aa, Artificial Sequence
  No. 177  HC CDR3
GGSYYNVMYWFDP

SEQ ID NO: 1063 - protein, 11 aa, Artificial Sequence
  No. 178  LC CDR1
RASQGISNSLA

SEQ ID NO: 1064 - protein, 7 aa, Artificial Sequence
  No. 178  LC CDR2
AASRLES

SEQ ID NO: 1065 - protein, 9 aa, Artificial Sequence
  No. 178  LC CDR3
QQYYSTPFT

SEQ ID NO: 1066 - protein, 5 aa, Artificial Sequence
  No. 178  HC CDR1
DYYIQ

SEQ ID NO: 1067 - protein, 17 aa, Artificial Sequence
  No. 178  HC CDR2
WINPNSGDTNYAHKFQG

SEQ ID NO: 1068 - protein, 13 aa, Artificial Sequence
  No. 178  HC CDR3
GGSYYNVMYWFDP

SEQ ID NO: 1069 - protein, 13 aa, Artificial Sequence
  No. 179  LC CDR1
SGSSSNIGSNTVN

SEQ ID NO: 1070 - protein, 7 aa, Artificial Sequence
  No. 179  LC CDR2
SNNQRPS

SEQ ID NO: 1071 - protein, 11 aa, Artificial Sequence
  No. 179  LC CDR3
AAWDDSLNSGV

SEQ ID NO: 1072 - protein, 5 aa, Artificial Sequence
  No. 179  HC CDR1
SNWIG

SEQ ID NO: 1073 - protein, 17 aa, Artificial Sequence
  No. 179  HC CDR2
IIYPGDSDTRYSPSFQG

SEQ ID NO: 1074 - protein, 12 aa, Artificial Sequence
  No. 179  HC CDR3
TYGSGSYSDFDY

SEQ ID NO: 1075 - protein, 13 aa, Artificial Sequence
  No. 180  LC CDR1
SGSSSNIGSNTVN

SEQ ID NO: 1076 - protein, 7 aa, Artificial Sequence
  No. 180  LC CDR2
SNNQRPS

SEQ ID NO: 1077 - protein, 11 aa, Artificial Sequence
  No. 180  LC CDR3
AAWDDSLNGGV

SEQ ID NO: 1078 - protein, 5 aa, Artificial Sequence
  No. 180  HC CDR1
SNWIG

SEQ ID NO: 1079 - protein, 17 aa, Artificial Sequence
  No. 180  HC CDR2
IIYPGDSDTRYSPSFQG

SEQ ID NO: 1080 - protein, 12 aa, Artificial Sequence
  No. 180  HC CDR3
TYGSGSYSDFDY

SEQ ID NO: 1081 - protein, 14 aa, Artificial Sequence
  No. 181  LC CDR1
TGSSSNIGAGYDVH

SEQ ID NO: 1082 - protein, 7 aa, Artificial Sequence
  No. 181  LC CDR2
GNSNRPS

SEQ ID NO: 1083 - protein, 11 aa, Artificial Sequence
  No. 181  LC CDR3
QSYDSSLSGWV

SEQ ID NO: 1084 - protein, 5 aa, Artificial Sequence
  No. 181  HC CDR1
DYAMS

SEQ ID NO: 1085 - protein, 17 aa, Artificial Sequence
  No. 181  HC CDR2
VISGSGGSTSNADSVKG

SEQ ID NO: 1086 - protein, 19 aa, Artificial Sequence
  No. 181  HC CDR3
VYCGDDCYPVVGTPGDAFD

SEQ ID NO: 1087 - protein, 14 aa, Artificial Sequence
  No. 182  LC CDR1
TGSSSNIGAGYDVH

SEQ ID NO: 1088 - protein, 7 aa, Artificial Sequence
  No. 182  LC CDR2
GNSNRPS

SEQ ID NO: 1089 - protein, 11 aa, Artificial Sequence
  No. 182  LC CDR3
QSYDSSLSGVV

SEQ ID NO: 1090 - protein, 5 aa, Artificial Sequence
  No. 182  HC CDR1
DYAMS

SEQ ID NO: 1091 - protein, 17 aa, Artificial Sequence
  No. 182  HC CDR2
VISGSGGSTSNADSVKG

SEQ ID NO: 1092 - protein, 19 aa, Artificial Sequence
  No. 182  HC CDR3
VYCGDDCYPVVGTPGDAFD

SEQ ID NO: 1093 - protein, 13 aa, Artificial Sequence
  No. 183  LC CDR1
SGSSSNIGSNTVN

SEQ ID NO: 1094 - protein, 7 aa, Artificial Sequence
  No. 183  LC CDR2
SNNQRPS

SEQ ID NO: 1095 - protein, 11 aa, Artificial Sequence
  No. 183  LC CDR3
AAWDDSLMQGV

SEQ ID NO: 1096 - protein, 5 aa, Artificial Sequence
  No. 183  HC CDR1
NYWIA

SEQ ID NO: 1097 - protein, 17 aa, Artificial Sequence
  No. 183  HC CDR2
IIYPYDSDTRKSPSFQG

SEQ ID NO: 1098 - protein, 11 aa, Artificial Sequence
  No. 183  HC CDR3
QDSGTYGWIDY

SEQ ID NO: 1099 - protein, 13 aa, Artificial Sequence
  No. 184  LC CDR1
TRSSGSIASNYVQ

SEQ ID NO: 1100 - protein, 7 aa, Artificial Sequence
  No. 184  LC CDR2
EDNQRPS

SEQ ID NO: 1101 - protein, 11 aa, Artificial Sequence
  No. 184  LC CDR3
YCQSYDSSNWV

SEQ ID NO: 1102 - protein, 7 aa, Artificial Sequence
  No. 184  HC CDR1
SSSYYWG

SEQ ID NO: 1103 - protein, 16 aa, Artificial Sequence
  No. 184  HC CDR2
NFYYSGSTYYNPSLKS

SEQ ID NO: 1104 - protein, 10 aa, Artificial Sequence
  No. 184  HC CDR3
QEWLRGGFDD

SEQ ID NO: 1105 - protein, 13 aa, Artificial Sequence
  No. 185  LC CDR1
SGSSSNVGSNIVN

SEQ ID NO: 1106 - protein, 7 aa, Artificial Sequence
  No. 185  LC CDR2
NNNQRPS

SEQ ID NO: 1107 - protein, 11 aa, Artificial Sequence
  No. 185  LC CDR3
AAWDDSLNAWV

SEQ ID NO: 1108 - protein, 5 aa, Artificial Sequence
  No. 185  HC CDR1
NHWIA

SEQ ID NO: 1109 - protein, 17 aa, Artificial Sequence
  No. 185  HC CDR2
IIYPYDSDTKYSPSFQG

SEQ ID NO: 1110 - protein, 10 aa, Artificial Sequence
  No. 185  HC CDR3
NPTVTNWFDS

SEQ ID NO: 1111 - protein, 14 aa, Artificial Sequence
  No. 186  LC CDR1
TGSSSNIGAGYDVH

SEQ ID NO: 1112 - protein, 7 aa, Artificial Sequence
  No. 186  LC CDR2
GNSNRPS

SEQ ID NO: 1113 - protein, 13 aa, Artificial Sequence
  No. 186  LC CDR3
QSYDSSLSGPNWV

SEQ ID NO: 1114 - protein, 5 aa, Artificial Sequence
  No. 186  HC CDR1
SYAIS

SEQ ID NO: 1115 - protein, 17 aa, Artificial Sequence
  No. 186  HC CDR2
GIIPFFGTSNYAQKFQG

SEQ ID NO: 1116 - protein, 19 aa, Artificial Sequence
  No. 186  HC CDR3
GQFSDSSGYQHPYYDYGMD

SEQ ID NO: 1117 - protein, 14 aa, Artificial Sequence
  No. 187  LC CDR1
TGTSSDVGGYNYVS

SEQ ID NO: 1118 - protein, 7 aa, Artificial Sequence
  No. 187  LC CDR2
DVSNRPS

SEQ ID NO: 1119 - protein, 10 aa, Artificial Sequence
  No. 187  LC CDR3
SSYTSSSTLV

SEQ ID NO: 1120 - protein, 5 aa, Artificial Sequence
  No. 187  HC CDR1
THALS

SEQ ID NO: 1121 - protein, 17 aa, Artificial Sequence
  No. 187  HC CDR2
GIIPIFGPADYAQKFQG

SEQ ID NO: 1122 - protein, 18 aa, Artificial Sequence
  No. 187  HC CDR3
GLSLGFCSAGSCYDYLDY

SEQ ID NO: 1123 - protein, 13 aa, Artificial Sequence
  No. 188  LC CDR1
SGSSSDIGSNTVN

SEQ ID NO: 1124 - protein, 7 aa, Artificial Sequence
  No. 188  LC CDR2
SNNQRPS

SEQ ID NO: 1125 - protein, 11 aa, Artificial Sequence
  No. 188  LC CDR3
AAWDDSLNGWV

SEQ ID NO: 1126 - protein, 5 aa, Artificial Sequence
  No. 188  HC CDR1
NYAIN

SEQ ID NO: 1127 - protein, 17 aa, Artificial Sequence
  No. 188  HC CDR2
GIIPIFGTANYAQKFQG

SEQ ID NO: 1128 - protein, 24 aa, Artificial Sequence
  No. 188  HC CDR3
DRYPGYYDILTGQIGTGERNAMDV

SEQ ID NO: 1129 - protein, 14 aa, Artificial Sequence
  No. 189  LC CDR1
TGSSSNIGAGYDVH

SEQ ID NO: 1130 - protein, 7 aa, Artificial Sequence
  No. 189  LC CDR2
GNSNRPS

SEQ ID NO: 1131 - protein, 11 aa, Artificial Sequence
  No. 189  LC CDR3
QSYDSSLSGSV

SEQ ID NO: 1132 - protein, 5 aa, Artificial Sequence
  No. 189  HC CDR1
NYPLT

SEQ ID NO: 1133 - protein, 17 aa, Artificial Sequence
  No. 189  HC CDR2
GIIPIIGATNYAQKFQG

SEQ ID NO: 1134 - protein, 15 aa, Artificial Sequence
  No. 189  HC CDR3
GRGYSGYGAAYYFDY

SEQ ID NO: 1135 - protein, 11 aa, Artificial Sequence
  No. 190  LC CDR1
GGNNIGSKSVH

SEQ ID NO: 1136 - protein, 7 aa, Artificial Sequence
  No. 190  LC CDR2
YDSDRPS

SEQ ID NO: 1137 - protein, 11 aa, Artificial Sequence
  No. 190  LC CDR3
QVWDSSSDHWV

SEQ ID NO: 1138 - protein, 5 aa, Artificial Sequence
  No. 190  HC CDR1
SYYIH

SEQ ID NO: 1139 - protein, 17 aa, Artificial Sequence
  No. 190  HC CDR2
FINPSDVTTYYAQKFQG

SEQ ID NO: 1140 - protein, 12 aa, Artificial Sequence
  No. 190  HC CDR3
SRIAPTEDFFDY

SEQ ID NO: 1141 - protein, 110 aa, Artificial Sequence
  No.1  LC variable region
ELVLTQPPSASGTPGQRVTISCSGSSSNIGSNTVNWYQQLPGTAPKLLIYSNNQRPSGVPDRFSGSKSGTSASLAISSLRSEDEADYYCASWDDRLSALVFGGGTKLTVL

SEQ ID NO: 1142 - protein, 128 aa, Artificial Sequence
  No. 1  HC variable region
QVQLQQWGAGLLKPSETLSLTCAVYGGSFSGYYWSWIRQPPGKGLEWIGEINHSGSTNYNPSLKSRVTISVDTSKNQSSLKLNSVTAADTALYYCARGRYSSNWYEAWTPRGIGMDVWGQGTTVTVSS

SEQ ID NO: 1143 - protein, 110 aa, Artificial Sequence
  No.2  LC variable region
ELVLTQPPSVSAAPGQKVTISCSGSSSNIGNNYVSWYQQLPGTAPKLLIFDNNKRPSGIPDRFSGSKSGTSATLGITGLQTGDEAEYYCGTWDSSLSGWVFGGGTKVTVL

SEQ ID NO: 1144 - protein, 117 aa, Artificial Sequence
  No. 2  HC variable region
QVQLVQSGAEVKKPGASVKVSCKASGYTFTSYYMHWVRQAPGQGLEWLGIINRSGGSTIYAQTFQGRVTMTRDTSTSTVYMEMSSLTSEDTAVYYCARGGRHSLDVWGKGTTVTVSS

SEQ ID NO: 1145 - protein, 110 aa, Artificial Sequence
  No.3  LC variable region
ELELTQPPSVSGTPGQRVTISCSGSSSNIGSNTVNWYQQLPGTAPKLLIYSNNQRPSGVPDRFSGSKSGTSASLAISGLQSEDEADYYCAAWDDSLNGPVFGGGTKLTVL

SEQ ID NO: 1146 - protein, 124 aa, Artificial Sequence
  No. 3  HC variable region
QVQLVQSGGGLVQPGGSLRLSCAASDFTFSSYAMSWVRQAPGKGLEWVSAISGSGGDTYYADSVKGRFTISRDNSKNTLYLQMNSLRAEDTAVYYCAKVRYYDFWSGWDVMDVWGQGTTVTVSS

SEQ ID NO: 1147 - protein, 110 aa, Artificial Sequence
  No.4  LC variable region
ELVLTQPPSVSAAPGQKVTISCSGSSSNIGNNYVSWYQQLPGTAPKLLIYDNNKRPSGIPDRFSGSKSGTSATLGITGLQTGDEADYYCGTWDSSLSAWVFGGGTKLTVL

SEQ ID NO: 1148 - protein, 117 aa, Artificial Sequence; identical to SEQ ID NO: 1144
  No. 4  HC variable region

SEQ ID NO: 1149 - protein, 110 aa, Artificial Sequence
  No.5  LC variable region
ELVLTQPPSVSAAPGQKVTISCSGSSSNIGNNYVSWYQQLPGTAPKLLIYDNNKRPSGIPDRFSGSKSGTSATLGITGLQTGDEADYYCGTWDSSLSAVVFGGGTKVTVL

SEQ ID NO: 1150 - protein, 124 aa, Artificial Sequence
  No. 5  HC variable region
EVQLVQSGGGLVQSGGSLRLSCAASGFPLSRYAMSWVRQAPGKGLEWVSAISGSGGSTYYADSVKGRFTISRDNSKNTLYLQMNSLRAEDTAVYYCAKGPRGQDYGDYGFLDYWGQGTLVTVSS

SEQ ID NO: 1151 - protein, 110 aa, Artificial Sequence
  No.6  LC variable region
ELVVTQPPSVSGAPGQRVTISCTGSSSNIGNNYVSWYQQLPGTAPKLLIYDNNKRPSGIPDRFSGSKSGTSATLGITGLQTGDEADYYCGTWDSSLSAWVFGGGTKVTVL

SEQ ID NO: 1152 - protein, 117 aa, Artificial Sequence
  No. 6  HC variable region
QVQLVQSGAEVKKPGASVKVSCKASGYTFTSYYMHWVRQAPGQGLEWLGIINRSGGSTIYAQTFQGRVTMTRDTSTSTVYMEMSSLTSEDTAVYYCARGGRHSLDAWGKGTTVTVSS

SEQ ID NO: 1153 - protein, 110 aa, Artificial Sequence
  No.7  LC variable region
ELELTQPPSVSAAPGQKVTISCSGSSSNIGNNYVSWYQQLPGTAPKLLIYDNNKRPSGIPDRFSGSKSGTSATLGITGLQTGDEADYYCGTWDSSLSAWVFGGGTQLTVL

SEQ ID NO: 1154 - protein, 120 aa, Artificial Sequence
  No. 7  HC variable region
EVQLVQSGAELKKPGSSVRLSCKASGGPFERKVIAWVRQAPGQGLEWVGGHAPFVRKPTYAQKFQGRVTMTADDSTATAFMELSSLGYGDTGVYYCATKAVTTYSGFDNWGQGTLVFVST

SEQ ID NO: 1155 - protein, 107 aa, Artificial Sequence
  No.8  LC variable region
ELQMTQSPSSLSASVGDRVTITCRASQGISNSLAWYQQKPGKAPKLLLYAASRLESGVPSRFSGSGSGTDYTLTISSLQPEDFATYYCQQYYSTPYTFGQGTKLEIK

SEQ ID NO: 1156 - protein, 117 aa, Artificial Sequence
  No. 8  HC variable region
EVQLVQSGGGLVKPGGSLRLSCAASGFTFSNAWMTWVRQAPGKGLEWVGRIKTKTDGGTTDYAAPVKGRFTISRNDSKNMLYLQMNSLKTEDTAVYYCTTHSRPDYWGQGTLVTVSS

SEQ ID NO: 1157 - protein, 110 aa, Artificial Sequence; identical to SEQ ID NO: 1153
  No.9  LC variable region

SEQ ID NO: 1158 - protein, 120 aa, Artificial Sequence
  No. 9  HC variable region
QVQLVQSGAEVKKPGSSVRLSCKASGGPFERKVIAWVRQAPGQGLEWVGGHAPFVRKPTYAQKFQGRVTMTADDSTSTAFMELSTLRSDDTAVYYCATKAVTTYSGFDTWGQGTLVLVSA

SEQ ID NO: 1159 - protein, 107 aa, Artificial Sequence
  No.10  LC variable region
ELQMTQSPATLSVSPGERATLSCRASQSVSSNLAWYQQKPGQPPKLLLYWASTRESGVPDRFSGSGSGTDFTLTISSLQAEDAAVYYCLQYFTIPWTFGQGTKVEIK

SEQ ID NO: 1160 - protein, 117 aa, Artificial Sequence
  No. 10  HC variable region
EVQLVQSGGGLVEPGGSLRLSCAASGFTFGNAWMSWVRQAPGKGLEWVGRIKTKTDGGTTDYAAPVKGRFTISRDDSKNTLYLQMNSLKTEDTAVYYCTTFSTPDYWGQGTLVTVSS

SEQ ID NO: 1161 - protein, 110 aa, Artificial Sequence
  No.11  LC variable region
ELALTQPPSVSGSPGQSITISCTGTSSDVGGYNYVSWYQQHPGKAPKLMIYDVSKRPSGVPNRFSGSKSGNTASLTISGLQAEDEADYYCSSYTSSSTLVFGGGTKVTVL

SEQ ID NO: 1162 - protein, 122 aa, Artificial Sequence
  No. 11  HC variable region
EVQLVQSGAEVKKPGSSVRVSCKASGDTFIRYAISWVRQAPGQGPEWMGGIIPIFGKVNYAQKFQDRVTITADESTSTVNMELSSLRSEDTAVYYCAKGGSTWYGGNWFDPWGQGTLVTVSS

SEQ ID NO: 1163 - protein, 106 aa, Artificial Sequence
  No.12  LC variable region
ELELTQPPSVSVSPGQTARITCSGDVLAKKYARWFQQKPGQAPVLVIYKDSERPSGIPERFSGSSSGTTVTLTISGAQVEDEADYYCYSAADNNGVFGGGTQLTVL

SEQ ID NO: 1164 - protein, 127 aa, Artificial Sequence
  No. 12  HC variable region
EVQLLESGGGVVQPGRSLRLSCAASGFTFSSDAMHWVRQAPGKGLEWVAVISYDGSNKYYADSVKGRFTISRDNSKNTLYLQMNSLRAEDTAVYYCAREATYDSSGRPTGDYGMDVWGQGTTVTVSS

SEQ ID NO: 1165 - protein, 110 aa, Artificial Sequence
  No.13  LC variable region
ELVLTQPPSASGTPGQRVTISCSGSSSNIGSNTVNWYQQLPGTAPKLLIYSNNQRPSGVPDRFSGSKSGTSASLAISGLQSEDEADYYCAAWDDSLNGVVFGGGTKLTVL

SEQ ID NO: 1166 - protein, 128 aa, Artificial Sequence
  No. 13  HC variable region
QVQLQQWGAGLLKPSETLSLTCAVYGGSFSGYYWSWIRQPPGKGLEWIGEINHSGSTNYNPSLKSRVTISVDTSKNQFSLKLNSVTAADTALYYCARGRYSSNWYEAWTPRGIGMDVWGQGTTVTVSS

SEQ ID NO: 1167 - protein, 112 aa, Artificial Sequence
  No.14  LC variable region
ELALNQPPSVSGSPGQSITISCTGTSSDVGGYNYVSWYQQHPGKAHKLMMYDVSNRPSGAYNRFSGSKSGNTASLTISALQAEDEADYYCSSYTSSSTSHVVFGGGTKVTVL

SEQ ID NO: 1168 - protein, 128 aa, Artificial Sequence
  No. 14  HC variable region
EVQLVESGGGLVQPGGSLRLSCAGSGFTSSYAMNWVRQAPGKGLEWVSAISGSGGTTYYADSVKGRFTISRDNSKNTLYLQMNSLRAEDTAVYYCAKAPSDLSFIWTGYYSEYYFDYWGQGTLVTVSS

SEQ ID NO: 1169 - protein, 110 aa, Artificial Sequence
  No.15  LC variable region
ELELTQPPSVSGSPGQSVTISCTGTSSDVGGYNYVSWYQQHPGKAPKLMIYDVSKRPSGVSNRFSGSKSGNTASLTISGLQAEDEADYYCSSYTSSSTLVFGGGTKLTVL

SEQ ID NO: 1170 - protein, 123 aa, Artificial Sequence
  No. 15  HC variable region
QVQLQESGPGLVKPSETLSLTCTVSGYSISRGDYWGWIRQPPGKGLEWIGSIYHSGSTYYNPSLKSRVTISADTSKNQFSLKLSSVTAADTAAYYCARHGTSGYYYPNWFDPWGQGTLVTVSS

SEQ ID NO: 1171 - protein, 110 aa, Artificial Sequence
  No.16  LC variable region
ELELTQPPSVSGTPGQRVTISCSGSSSNIGSNTVNWYQQLPGTAPKLLIYSNNQRPSGVPDRFSGSKSGTSASLAISGLQSEDEADYYCAAWDDSLNASLFGGGTKVTVL

SEQ ID NO: 1172 - protein, 128 aa, Artificial Sequence; identical to SEQ ID NO: 1166
  No. 16  HC variable region

SEQ ID NO: 1173 - protein, 110 aa, Artificial Sequence
  No.17  LC variable region
ELELTQPPSVSGTPGQRVTISCSGSTSNIGSNTVNWYQQLPGTAPKLLIYTDNRRPSGVPDRFSGSKSGTSASLAISGLQSEDEADYYCAAWDDSLNGYVFGTGTKLTVL

SEQ ID NO: 1174 - protein, 128 aa, Artificial Sequence; identical to SEQ ID NO: 1166
  No. 17  HC variable region

SEQ ID NO: 1175 - protein, 110 aa, Artificial Sequence
  No.18  LC variable region
ELELTQPPSVSGTPGQRVTISCSGSSSNIGSNTVNWYQQLPGTAPKLLIYSNNQRPSGVPDRFSGSKSGTSASLAISGLQSEDEADYYCAAWDDSLNGPVFGGGTKVTVL

SEQ ID NO: 1176 - protein, 128 aa, Artificial Sequence; identical to SEQ ID NO: 1166
  No. 18  HC variable region

SEQ ID NO: 1177 - protein, 110 aa, Artificial Sequence
  No.19  LC variable region
ELVLTQPPSASGTPGQRVTISCSGSSSNIGSNTVNWYQQLPGTAPKLLIYSNNQRPSGVPDRFSGSKSGTSASLAISGLQSEDEADYYCAARDDSLNGAVFGGGTKVTVL

SEQ ID NO: 1178 - protein, 128 aa, Artificial Sequence; identical to SEQ ID NO: 1166
  No. 19  HC variable region

SEQ ID NO: 1179 - protein, 111 aa, Artificial Sequence
  No.20  LC variable region
ELVLTQSPSVSAAPGQKVTISCSGSSSNIGNNYVSWYQQLPGTAPKLLIYDNNKRPSGIPDRFSGSKSGTSATLGITGLQTGDEADYYCGTWDSSLSAGPVFGGGTKVTVL

SEQ ID NO: 1180 - protein, 128 aa, Artificial Sequence
  No. 20  HC variable region
QITLKESGPTLVKPTQTLTLTCTFSGFSLSTSGVGVGWIRQPPGKALEWLALIDWDDNKYYTTSLKTRLTISKDTSKNQVVLTMTNMDPVDTATYYCARIPGFLRYRNRYYYYGMDVWGQGTTVTVSS

SEQ ID NO: 1181 - protein, 109 aa, Artificial Sequence
  No. 21  LC variable region
ELTLTQSPGTLSLSPGERATLSCRASQSVSSYLAWYQQKPGQAPRLLIYDASNRATGIPARFSGSGSGTDFTLTISRLEPEDFAVYYCQEYGSSPRRVTFGPGTKVEIK

SEQ ID NO: 1182 - protein, 129 aa, Artificial Sequence
  No. 21  HC variable region
EVQLVQSGPGLVKPSETLSLTCTVSGDSISSSSYYWGWIRQPPGKGLEWIGSIYYSGSTYYNPSLKSRVTISVDTSKNQFSLNLSSATAADTAVYYCARGSRGYYDFLTGYSTGGFDYWGQGTLVAVSS

SEQ ID NO: 1183 - protein, 107 aa, Artificial Sequence
  No. 22  LC variable region
ELVMTQSPATLSLSPGERATLSCRASQSVSSYLAWYQQKPGQAPRLLIYDASTRATGIPARFSGSGSGTDFTLTINGLQAEDVAVYYCQQYYQVPLTFGGGTKVEIK

SEQ ID NO: 1184 - protein, 129 aa, Artificial Sequence
  No. 22  HC variable region
QVQLQESGPGLVKPSETLSLTCTVSGDSISSSSYYWGWIRQPPGKGLEWIGSIYYSGSTYYNPSLKSRVTISVDTSKNQFSLNLSSATAADTAVYYCARGSRGYYDFLTGYSTGGFDYWGQGTLVAVSS

SEQ ID NO: 1185 - protein, 110 aa, Artificial Sequence
  No. 23  LC variable region
ELGQTQQLSVSAAPGQKVTISCSGSSSNIGNNYVSWYQQLPGTAPKLLIYDNNKRPSGIPDRFSGSKSGTSATLGITGLQTGDEADYYCGTWDSSLSAVVFGGGTKVTVL

SEQ ID NO: 1186 - protein, 128 aa, Artificial Sequence
  No. 23  HC variable region
EVQLVESGGGVVQPGRSLRLSCAASGLTFSDYGMHWVRQAPGKGLEWVAAISYDGSNKYYADSVKGRFTISRDNSKNTVYLQMNSLRAEDTAVYYCARDSGLYGSGWSTYQYYAMDVWGQGTTVTVSS

SEQ ID NO: 1187 - protein, 110 aa, Artificial Sequence
  No. 24  LC variable region
ELELTQPPSVSGSPGQSVTISCTGTSSDVGGYNYVSWYQHHPGKAPKLMIYDVSKRPSGVPDRFSGSKSGNTASLTISGLQAEDEADYYCSSYTSSSTYVFGTGTKLTVL

SEQ ID NO: 1188 - protein, 121 aa, Artificial Sequence
  No. 24  HC variable region
QVQLVQSGAEVKKPGSSVKVSCKVSGYTLTELSIHWVRQAPGKGLEWMGGFDPEDAETIYAQKFQGRVTMTEDTSTDTAYMELSSLRSEDTAVYYCATSPAVTTAGWFDPWGQGTLVTVSS

SEQ ID NO: 1189 - protein, 110 aa, Artificial Sequence
  No. 25  LC variable region
ELELTQPPSVSGTPGQRVTISCSGSSSNIGTNTVNWYQHLPGMAPKLLIYSNNQRPSGVPDRFSGSKSGTSASLAISGLQSEDEADYYCAAWDDSLNGLLFGGGTKVTVL

SEQ ID NO: 1190 - protein, 128 aa, Artificial Sequence; identical to SEQ ID NO: 1166
  No. 25  HC variable region

SEQ ID NO: 1191 - protein, 110 aa, Artificial Sequence
  No. 26  LC variable region
ELELTQPPSVSGSPGQSITISCTGTSSDVGGYNYVSWYQQHPGKAPKLMIYDVGKRPSGVSNRFSGSKSGNTASLTISGLQAEDEADYYCSSYTSSSTWVFGGGTKVTVL

SEQ ID NO: 1192 - protein, 120 aa, Artificial Sequence
  No. 26  HC variable region
EVQLVQSGAEVKKPGSSVKVSCKASGGTFSFYAISWMRQAPGQGLEWMGGIIPLFGTAKYAQRFQDRVTFIADDTSTAYMELNSLRSEDTAVYYCARGGWIYRGNWFDPWGQGTLVTVSS

SEQ ID NO: 1193 - protein, 111 aa, Artificial Sequence
  No. 27  LC variable region
ELELTQPPSVSGAPGQRVTISCTGSSSNIGAGYDVHWYQQLPGTAPKLLIYGNSNRPSGVPDRFSGSKSGTSASLAITGLQAEDEADYYCQSYDSSLSGWVLGGGTKLTVL

SEQ ID NO: 1194 - protein, 129 aa, Artificial Sequence
  No. 27  HC variable region
QVQLVQSGAEVKKPGATVKVSCKASGYTFNNYGISWVRQAPGQGLEWMGGISSHNGNTKYAQKLQGRVTMTTDTSTSTAYMELRSLRSDDTAVYYCAREGGYYYGSGSYYNPRFAFDIWGQGTMVTVSS

SEQ ID NO: 1195 - protein, 110 aa, Artificial Sequence
  No. 28  LC variable region
ELVLTQPPSASGSPGQSVTISCTGTSSDVGGYNYVSWYQQHPGKAPKLMIYEVSKRPSGVPDRFSGSKSGNTASLTVSGLQAEDEADYYCSSYAGSNYVVFGGGTKLTVL

SEQ ID NO: 1196 - protein, 129 aa, Artificial Sequence
  No. 28  HC variable region
QVQLVQSGGGLVQPGGSLRLSCAASGFTFSSYAMSWVRQAPGKGLEWVSAISGSGGTTYYADSVKGRFTISRDNSKNTLYLQMNSLRAEDTAVYYCAKAPSDLSFIWTGYYSEYYFDYWGQGTLVTVSS

SEQ ID NO: 1197 - protein, 111 aa, Artificial Sequence
  No. 29  LC variable region
ELELTQPPSVSGSPGQSITISCTGTSSDVGGYNYVSWYQQHPGKAPKLMIYDVSNRPSGVSNRFSGSKSGNTASLTISGLQAEDEADYYCSSYTSSSTLGVFGGGTKVTVL

SEQ ID NO: 1198 - protein, 129 aa, Artificial Sequence
  No. 29 HC variable region
EVQLLESGGGLVQPGGSLRLSCAASGFTFSSYAMSWVRQAPGKGLEWVSAISGSGGTTYYADSVKGRFTISRDNSKNTLYLQMNSLRAEDTAVYYCAKAPSDLSFIWTGYYSEYYFDYWGQGTLVTVSS

SEQ ID NO: 1199 - protein, 110 aa, Artificial Sequence; identical to SEQ ID NO: 1147
  No. 30  LC variable region

SEQ ID NO: 1200 - protein, 117 aa, Artificial Sequence
  No. 30  HC variable region
EVQLVQSGAEVKKPGASVKVSCKASGYTFTGYYMHWVRQAPGQGLEWLGVINRSGGSTIYAQTFQGRVTMTRDTSTSTAYMEMSSLTSEDTAVYYCARGGRHSLDVWGKGTTVTVSS

SEQ ID NO: 1201 - protein, 110 aa, Artificial Sequence
  No. 31  LC variable region
ELELTQPPSVSGTPGQRVTISCSGSSSNIGSNTVNWYQQLPGTAPKLLIYSNNQRPSGVPDRFSGSKSGTSASLAISGLQSEDEADYYCAAWDDSLNGLVFGTGTKLTVL

SEQ ID NO: 1202 - protein, 119 aa, Artificial Sequence
  No. 31  HC variable region
QVQLVQSGAEVKKPGESLKISCKGSGYSFISYWIVWVRQMPGKGLEWMGTIYPGDSDTRYSPSFQGQVTISADKSISTAYLQWSSLKASDTAMYYCARGPNIYNWFDSWGQGTLVTVSS

SEQ ID NO: 1203 - protein, 107 aa, Artificial Sequence
  No. 32  LC variable region
ELVLTQSPSSLSASVGDRVTITCRASQSISSYLNWYQQKPGKAPKLLIYAASSLQSGVPSRFSGSGSGTDFTLTISSLQPEDFATYYCQQSYSTPLTFGGGTKLEIK

SEQ ID NO: 1204 - protein, 119 aa, Artificial Sequence
  No. 32  HC variable region
EVQLVQSGGGLIQPGGSLRLSCAASEFIVSSNYMTWVRQAPGKGLEWVSIIYPGGSTYYADSVKGRFTISRDNSKNTLYLRMNSLRAEDTAVYYCARDLPLTGTTLDYWGQGTLVTVSS

SEQ ID NO: 1205 - protein, 108 aa, Artificial Sequence
  No. 33  LC variable region
ELVLTQSPSVSVAPGKTARITCGGNNIGSKSVHWYQQKPGQAPVLVVYDDSDRPSGIPERFSGSNSGNTATLTISRVEAGDEADYYCQVWDSSSDHVVFGGGTKVTVL

SEQ ID NO: 1206 - protein, 128 aa, Artificial Sequence
  No. 33  HC variable region
EVQLVESGGGVVQPGRSLRLSCAASGLTFSDYGMHWVRQAPGKGLEWVAAISYDGSNKYYADSVKGRFTISRDNSKNTVYLQMNSLRAEDTAVYYCVRDSGLYGSGWSTYQYYAMDVWGQGTTVTVSS

SEQ ID NO: 1207 - protein, 111 aa, Artificial Sequence
  No. 34  LC variable region
ELELTQPPSVSGAPGQRVTISCTGSSSNIGAGYDVHWYQQLPGTAPKLLIYGNSNRPSGVPDRFSGSKSGTSASLAITGLQAEDEADYYCQSYDSSLSGWVFGGGTKVTVL

SEQ ID NO: 1208 - protein, 124 aa, Artificial Sequence
  No. 34  HC variable region
QVQLVQSGAEVKKPGSSVKVSCKTSGGTFSNYPLTWVRQAPGQGLEWLGGIIPIIGATNYAQKFQGRVTITADESTSTAFMELSSLRSEDTAVYYCARGRGYSGYGAAYYFDYWGQGTLVTVSS

SEQ ID NO: 1209 - protein, 112 aa, Artificial Sequence
  No. 35  LC variable region
ELELTQPPSVSGAPGQRVTISCTGSSSNIGAGYDVHWYQQLPGTAPKLLIYGNSNRPSGVPDRFSGSKSGTSASLAITGLQAGDEADYYCQSYDSSLSGSWVFGGGTKLTVL

SEQ ID NO: 1210 - protein, 128 aa, Artificial Sequence
  No. 35  HC variable region
EVQLVQSGAEVKKPGSSVKVSCKASGGTFSRYAISWVRQAPGQGLEWMGGIIPIFGTGNYAQKFQGRVTITADESTSTAYMELSSLRSEDTAVYYCARSLYYYDRSGYPISEDYFDYWGQGTLVTVSA

SEQ ID NO: 1211 - protein, 108 aa, Artificial Sequence
  No. 36  LC variable region
ELTLTQSPGTLSLSPGERATLSCRASQSVGSSYLAWYQQKPGQAPRLLIYGASSRATGIPDRFSGSGSGTDFTLTISRLEPEDFAVYYCQQYGSSPLTFGGGTRLEIK

SEQ ID NO: 1212 - protein, 129 aa, Artificial Sequence
  No. 36  HC variable region
EVQLVESGPGLVKPSETLSLTCTVSGDSISSSSYYWGWIRQPPGKGLEWIGNIFYSGSTYYNPSLKSRVTISVDTSKNQFSLKLSSVTAADAAVYYCARGSRGYYDILTGYSTGGFDYWGQGTLVTVSS

SEQ ID NO: 1213 - protein, 110 aa, Artificial Sequence
  No. 37  LC variable region
ELVLTQPPSASGTPGQRVTISCSGSSSNIGSNTVNWYQQLPGTAPKLLIYTNNRRPSGAPDRFSGSKSGTSASLAISGLQSEDEADYYCAAWDDSLNGLVFGGGTKVTVL

SEQ ID NO: 1214 - protein, 119 aa, Artificial Sequence
  No. 37  HC variable region
EVQLVQSGAEVKKPGESLKISCRGSGYSFTSHWIAWVRQMPGKGLEWMGIIYPGDSDSRYSPSFQGQVTISADKSISTAYLQWSSLKASDTAIYYCARGPNLYNWFDSWGQGTLVTVSS

SEQ ID NO: 1215 - protein, 108 aa, Artificial Sequence
  No. 38  LC variable region
ELVVTQEPSVSVAPGKTARITCGGNNIGSKSVHWYQQKPGQAPVLVIYYDSDRPSGIPERFSGSNSGNTATLTISRVEAGDEADYYCQVWDSSSDHWVFGGGTELTVL

SEQ ID NO: 1216 - protein, 129 aa, Artificial Sequence
  No. 38  HC variable region
EVQLVQSGGGLVQPGGSLRLSCAASGFTFSDYAMSWVRQAPGKGLEWVSVISGSGGSTSNADSVKGRFTISRDNSKSTLYLQMNSLRAEDTAVYYCAKVYCGDDCYPVVGTPGDAFDIWGQGTMVTVSS

SEQ ID NO: 1217 - protein, 111 aa, Artificial Sequence
  No. 39  LC variable region
ELELTQPPSVSAAPGQKVTISCSGSSSNIGNNYVSWYQQLPGTAPKLLIYDNNKRPSGIPDRFSGSKSGTSATLGITGLQTGGEADYYCGTWDSSLSAGWVFGGGTKVTVL

SEQ ID NO: 1218 - protein, 128 aa, Artificial Sequence; identical to SEQ ID NO: 1186
  No. 39  HC variable region

SEQ ID NO: 1219 - protein, 107 aa, Artificial Sequence
  No. 40  LC variable region
ELVMTQSPGTLSLSPGERATLSCRASQSVSSYLAWYQQKPGQAPRLLIYDASNRATGIPARFSGSGSGTDFTLTISSLEPEDFAVYYCQQYGSSPQTFGQGTKVEIK

SEQ ID NO: 1220 - protein, 130 aa, Artificial Sequence
  No. 40  HC variable region
QVQLQESGPGLVKPSETLSLTCTVSGDSISGSSSYYWGWIRQPPGKGLEWIGNIFYSGSTYYNPSLKSRVTISVDTSKNQFSLKLSSVTAADTAMYYCARGSRGYYDILTGYSTGGFDYWGQGTLVTVSS

SEQ ID NO: 1221 - protein, 110 aa, Artificial Sequence
  No. 41  LC variable region
ELVLTQPPSASGTPGQRVTISCSGSSSNIGSNTVNWYQQLPGTAPKLLIYSNNQRPSGVPDRFSGSKSGTSASLAISGLQSEDEADYYCAAWDDSLNGYVFGTGTKVTVL

SEQ ID NO: 1222 - protein, 124 aa, Artificial Sequence
  No. 41  HC variable region
QVQLQQWGAGLLKPSETLSLTCAVYGGSFSGYYWSWIRQPPGKGLEWIGEINHSGSTNYNPSLKSRVTISVDTSKNQFSLKLSSVTAADTAVYYCARGRYYSSWYGPRTWFDPWGQGTLVTVSS

SEQ ID NO: 1223 - protein, 110 aa, Artificial Sequence
  No. 42  LC variable region
ELMLTQPHSVSESPGKTVTISCTRSSGSIASNYVQWYQQRPGSSPTTVIYEDNQRPSGVPDRFSGSIDSSSNSASLTISGLKTEDEADYYCQSYDSSNWVFGGGTKLTVL

SEQ ID NO: 1224 - protein, 120 aa, Artificial Sequence
  No. 42  HC variable region
QVQLQESGPGLVKPSETLSLTCTVSGGSISSSSYYWGWIRQPPGKGLEWIGNFYYSGSTYYNPSLKSRVTISVDTSKNQFSLKLNSVTAADTAVYFCARQEWLRGGFDDWGQGTLVTVSS

SEQ ID NO: 1225 - protein, 110 aa, Artificial Sequence
  No. 43  LC variable region
ELELTQPPSVSGAPGQRVTISCSGSSSNIGGNYVHWYQQLPGAAPKLLIYSNDQRPSGVPDRFSGSKSGTSASLAISGLQSEDEADYYCAAWDDSLNGRVFGGGTKVTVL

SEQ ID NO: 1226 - protein, 131 aa, Artificial Sequence
  No. 43  HC variable region
EVQLVQSGAEVKKPGSSVKVSCKASGGTFSSYAISWVRQAPGQGLEWMGGIIPIFGTANYAQRFQGRVTITADESTSTAYMELSSLRSEDTAVYYCARDGVVVPAVMYDTTDPYYYGMDVWGQGTTVTVSS

SEQ ID NO: 1227 - protein, 108 aa, Artificial Sequence
  No. 44  LC variable region
ELVLTQSPATLSLSPGERATLSCRASQSVSSYLAWYQQKPGQAPRLLIYDASSRATGIPDRFSGSGSGTDFTLTISRLEPEDFAVYYCQQYGSSPSITFGQGTRLEIK

SEQ ID NO: 1228 - protein, 129 aa, Artificial Sequence
  No. 44  HC variable region
EVQLLESGPGLVKPSETLSLTCTVSGDSISSSSYYWGWIRQPPGKGLEWIGSIYYSGSTYYNPSLKSRVTISVDTSKNQFSLNLSSATAADTAVYYCARGSRGYYDFLTGYSTGGFDYWGQGTLVAVSS

SEQ ID NO: 1229 - protein, 111 aa, Artificial Sequence
  No. 45  LC variable region
ELVVTQPPSVSGAPGQRVTISCTGSSSNIGAGYDVHWYQQLPGTAPKLLIYGNSNRPSGVPDRFSGSKSGTSASLAITGLQAEDEAEYYCQSYDSSLSGPVFGGGTKLTVL

SEQ ID NO: 1230 - protein, 124 aa, Artificial Sequence
  No. 45  HC variable region
EVQLVQSGAEVKKPGSSVKVSCKASGGTFSSYDISWVRQAPGQGLEWMGGIIPILGIPNYAQKFQGRVTITADESTSTAYMELSSLRSEDTAVYYCARSRGYSGYGANWYFDLWGRGTLVTVSS

SEQ ID NO: 1231 - protein, 110 aa, Artificial Sequence
  No. 46  LC variable region
ELVLTQPPSVSESPGKTVTISCTRSSGSIASNYVQWYQQRPGSSPTTVIYEDNQRPSGVPDRFSGSIDSSSNSASLTISGLKTEDEADYYCQSYDSSNWVFGGGTKVTVL

SEQ ID NO: 1232 - protein, 120 aa, Artificial Sequence
  No. 46  HC variable region
QVQLVQSGAEVKKPGASVKVSCRASGYAFTRYGISWVRQAPGQGLEWMGWISAYNGNTKYAQKLQGRVTMTTDTSTSTAYLELRSLRSDDTAVYYCARVLGIAVAGTPIWGQGTLVTVSP

SEQ ID NO: 1233 - protein, 107 aa, Artificial Sequence
  No. 47  LC variable region
ELVMTQSPATLSVSPGDRATLSCRASQSVRSDIAWYQQKPGQAPRLLIYDTSTRATGIPARFSGSGSGTEFTLTVSSLQAEDVAVYYCQQYYTTPFTFGPGTKVDIK

SEQ ID NO: 1234 - protein, 122 aa, Artificial Sequence
  No. 47  HC variable region
QVQLVQSGAEVKKPGASVKVSCKASGYTFTDYYIQWVRQAPGQGLEWMGWINPNSGDTNYAHKFQGRVTMTRDTSISTAYMELSRLRSDDTAVYYCARGGSYYNVMYWFDPWGQGTLVTVSS

SEQ ID NO: 1235 - protein, 112 aa, Artificial Sequence
  No. 48  LC variable region
ELELTQPPSVSGAPGQRVTISCTGSSSNIGAGYDVHWYQQLPGTAPKLLIYGNSNRPSGVPDRFSGSKSGTSASLAITGLQAEDEADYYCQSYDSSLSGLWVFGGGTKLTVQ

SEQ ID NO: 1236 - protein, 122 aa, Artificial Sequence
  No. 48  HC variable region
EVQLVQSGGGLIQPGGSLRLSCAASGFTVSSNYMSWVRQPPGKGLEWVSVIYPGGSTFFADSVQGRFTISRDNSKNTLYLQMNSLRAEDTAVYYCARSYDFLTDYTDAFDIWGQGTMVTVSS

SEQ ID NO: 1237 - protein, 110 aa, Artificial Sequence
  No. 49  LC variable region
ELELTQPPSVSGSPGQSITISCTGTSSDVGGYNYVSWYQQHPGKAPKLMIYDVSNRPSGVSNRFSGSKSGNTASLTISGLQAEDEADYYCSSYTSSSPWVFGGGTKVTVL

SEQ ID NO: 1238 - protein, 120 aa, Artificial Sequence
  No. 49  HC variable region
EVQLLESGGDLVQPGGSLRLSCAASGFTFSSYAMSWVRQAPGKGLEWVSGISGSGGSTYYADSVKGRFTISRDNSKNTLYLQMNSLRAEDTAVYYCASGVVTADWYFDLWGRGTLATVSS

SEQ ID NO: 1239 - protein, 112 aa, Artificial Sequence
  No. 50  LC variable region
ELVLTQPPSVSGAPGQRVTISCTGSSSNIGAGYDVHWYQQLPGTAPKLLIYGNSNRPSGVPDRFSGSKSGTSASLAITGLQAEDEADYYCQSYDSSLSGPWVFGGGTKLTVL

SEQ ID NO: 1240 - protein, 128 aa, Artificial Sequence
  No. 50  HC variable region
QVQLVQSGAEVKKPGSSVKVSCKASGVTFSRYAINWVRQAPGQGLEWMGGIIPLLGTADYPQKFQGRVTITTDESTTTAYMELSSLRSEDTAVYYCARTLYYYDRSGNARTDDYFDHWAQGTLVTVSS

SEQ ID NO: 1241 - protein, 107 aa, Artificial Sequence
  No. 51  LC variable region
ELVMTQSPATLSLSPGERATLSCRASQSVSSYLAWYQQKPGQAPRLLIYDASNRATGIPDRFSGSGSGTDFTLTISRLEPEDFAVYYCQQYGSSPLTFGGGTKVEIK

SEQ ID NO: 1242 - protein, 129 aa, Artificial Sequence
  No. 51  HC variable region
EVQLLESGPGLVKPSETLSLTCTVSGDSISSSSYYWGWIRQPPGKGLEWVGSIYYSGSTYYNPSLKSRVTISVDTSKNQFSLNLSSATAADTAVYYCARGSRGYYDFLTGYSTGGFDYWGQGTLVAVSS

SEQ ID NO: 1243 - protein, 107 aa, Artificial Sequence
  No. 52  LC variable region
ELVMTQSPATLSVSPGERATLSCRASQSVNSNLAWYQQKPGQAPRLLIYDASTRATGIPARFSGSGSGTEFTLTISSLQSEDFAVYYCQQYNNWPLTFGGGTKLEIK

SEQ ID NO: 1244 - protein, 129 aa, Artificial Sequence
  No. 52  HC variable region
EVQLVESGPGLVKPSETLSLTCTVSGDSISSSSYYWGWIRQPPGKGLEWIGSIYYSGSTYYNPSLKSRVTISVDTSKNQFSLNLSSATAADTAVYYCARGSRGYYDFLTGYSTGGFDYWGQGTLVAVSS

SEQ ID NO: 1245 - protein, 107 aa, Artificial Sequence
  No. 53  LC variable region
ELQMTQSPSSLSASVGDRVTITCRASQSISSYLNWYQQKPGKAPKLLIYAASSLQSGVPSRFSGSGSGTDFTLTISSLQPEDFATYYCQQSYSTPLTFGQGTKLEIK

SEQ ID NO: 1246 - protein, 122 aa, Artificial Sequence; identical to SEQ ID NO: 1236
  No. 53  HC variable region

SEQ ID NO: 1247 - protein, 111 aa, Artificial Sequence
  No. 54  LC variable region
ELVLTQPPSVSGAPGQRVTISCTGSSSNIGAGYDVHWYQQLPGTAPKLLIYGNSNRPSGVPDRFSGSKSGTSASLAITGLQAEDEADYYCQSYDSSLSGVVFGGGTKLTVL

SEQ ID NO: 1248 - protein, 128 aa, Artificial Sequence
  No. 54  HC variable region
EVQLLESGGGLVQPGRSLRLSCAASGFNFDDYAMHWVRQAPGKGLEWVSGISWNSGTIGYADSVKGRFIISRDNAKNSLYLQMRSLKPEDTALYYCAKEELGPYSNRWYSSSDGMDVWGQGTTVTVSS

SEQ ID NO: 1249 - protein, 107 aa, Artificial Sequence
  No. 55  LC variable region
ELQMTQSPSSLSASVGDRVTITCRASQSISSYLNWYQQKPGKAPKLLIYAASSLQSGVPSRFSGSGSGTDFTLTISSLQPEDFATYYCQQSYSTPLTFGGGTKVEIK

SEQ ID NO: 1250 - protein, 121 aa, Artificial Sequence
  No. 55  HC variable region
EVQLVQSGAEVKKPGSSVKVSCKASGGTFTSSAINWVRQAPGQGLEWMGGIIPIFGTVNYAQKFQGRVTITADEFTSTAYMELSSLRSEDTAIYYCARDHIVSPLYGMDVWGQGTTVTVSS

SEQ ID NO: 1251 - protein, 110 aa, Artificial Sequence
  No. 56  LC variable region
ELVLTQPPSVSAAPGQKVTISCSGSSSNIGNNYVSWYQQLPGTAPKLLIYDNNKRPSGIPDRFSGSKSGTSASLAITGLQAEDEADYYCQSYDSSLSAWVFGGGTKVTVL

SEQ ID NO: 1252 - protein, 122 aa, Artificial Sequence
  No. 56  HC variable region
EVQLVESGGGLIQPGGSLRLSCAASGFTVSSNYMSWVRQPPGKGLEWVSVIYPGGSTFFADSVQGRFTISRDNSKNTLYLQMNSLRAEDTAVYYCARSYDFLTDYTDAFDIWGQGTMVTVSS

SEQ ID NO: 1253 - protein, 107 aa, Artificial Sequence
  No. 57  LC variable region
ELQMTQSPSSLSASVGDRVTITCRASQGISNYLAWYQQKPGKAPKLLIYDASNLETGVPSRFSGSGSGTDFTLTISSLQAEDVAVYYCQQYYSTPITFGQGTRLEIK

SEQ ID NO: 1254 - protein, 122 aa, Artificial Sequence; identical to SEQ ID NO: 1234
  No. 57  HC variable region

SEQ ID NO: 1255 - protein, 110 aa, Artificial Sequence
  No. 58  LC variable region
ELALTQPPSVSGSPGQSITIPCTGTSSDVGGYSHVSWYQQHPGKAPKLILYEVSDRPSGVSNRFSGSKSGNTASLTISGLQAEDEADYYCNSYTSSSTWVFGGGTQLTVL

SEQ ID NO: 1256 - protein, 129 aa, Artificial Sequence
  No. 58  HC variable region
QVQLQESGPGLVKPSETLSLTCTVSGDSISSSSYYWGWIRQPPGKGLEWIGNIFYSGSTYYNPSLKSRVTISVDTSKNQFSLKLSSVTAADTAVYYCARGSRGYYDILTGYSTGGFDYWGRGTLVTVSS

SEQ ID NO: 1257 - protein, 107 aa, Artificial Sequence
  No. 59  LC variable region
ELQMTQSPATLSVSPGEGATLSCRASQSVSSNLAWYQHKPGQAPRLLIYDASTRATGIPARFSGSGSGTEFTLTISSLQSEDFAVYYCQQYNNWPLTFGGGTKLEIK

SEQ ID NO: 1258 - protein, 129 aa, Artificial Sequence
  No. 59  HC variable region
QVQLQESGPGLVKPSETLSLTCTVSGDSISGSSYYWGWIRQPPGKGLEWIGNIFYSGSTYYNPSLKSRVTISVDTPKNQFSLKLSSVTAADTAMYYCARGSRGYYDILTGYSTGGFDYWGQGTLVTVSS

SEQ ID NO: 1259 - protein, 109 aa, Artificial Sequence
  No. 60  LC variable region
ELVLTQSPATLSLSPGERATLSCRASQSVSSYLAWYQQKPGQAPRLLIYDASNRATGIPARFSGSGSGTDFTLTISSLEPEDFAVYYCQQRSNWPPALTFGGGTKLEIK

SEQ ID NO: 1260 - protein, 122 aa, Artificial Sequence
  No. 60  HC variable region
QVQLVQSGAEVKKPGSSVKVSCKASGGTFSSYAIIWVRQTPGQGLEWMGGIIPIFGTANYAQKFQGRVTITADESTSTAYMELSSLRSEDTAVYYCARVTGYDSSGYYQDYWGQGTLVTVSS

SEQ ID NO: 1261 - protein, 108 aa, Artificial Sequence
  No. 61  LC variable region
ELVLTQPPSVSVAPGKTARITCGGNNIGSKSVHWYQQKPGQAPVLVVYDDSDRPSGIPERFSGSNSGNTATLTISRVEAGDEADYYCQVWDSSSDRVVFGGGTKVTVL

SEQ ID NO: 1262 - protein, 122 aa, Artificial Sequence
  No. 61  HC variable region
EVQLLESGGALVQPGRSLRLSCAASGFTFDDYAMHWVRQGPGKGLEWVSGTTWNSGTIGYADSVKGRFIISRDNAENSLYLQMNSLRPEDTALYYCAKDIGSGDRPDAFHLWGQGTMVTVSS

SEQ ID NO: 1263 - protein, 110 aa, Artificial Sequence
  No. 62  LC variable region
ELVLTQPPSVSAAPGQKVTISCSGSSSNIENNYVSWYQQFPGTAPKLLIYDNNKRPSGIPDRFSGSKSGTSATLGITGLQTGDEADYYCGTWDNSLSAWVFGGGTKVTVL

SEQ ID NO: 1264 - protein, 117 aa, Artificial Sequence
  No. 62  HC variable region
EVQLVESGAEVKKPGASVKVSCKASGYTFTSYYMHWVRQAPGQGLEWLGIINRSGGSTIYAQTFQGRVTMTRDTSTSTVYMEMSSLTSEDTAVYYCARGGRHSLDVWGKGTTVTVSS

SEQ ID NO: 1265 - protein, 108 aa, Artificial Sequence
  No. 63  LC variable region
ELTLTQSPGTLSLSPGERATLSCRASQSVSSSYLAWYQQKPGQAPRLLIYGASSRATGIPDRFSGSGSGTDFTLTISRLEPEDFAVYYCQQYGSSPYTFGQGTKLEIK

SEQ ID NO: 1266 - protein, 121 aa, Artificial Sequence
  No. 63  HC variable region
EVQLVESGGGVVQPGRSLRLSCAASGFTFSSSPMHWVRQAPGKGLEWVAVISYGGSNKYYADSVKGRFTISRDNSKNTLYLQMNSLRAEDTAVYYCAREIALNNYYGMDVWGQGTTVTVSS

SEQ ID NO: 1267 - protein, 110 aa, Artificial Sequence
  No. 64  LC variable region
ELELTQPPSVSGSPGQSITISCTGNRSDIGGYNSLSWYQQHPGKAPKLIIYDVNNRPSGVSNRFSGSKSGNTASLAISGLQAEDEADYYCNSYTSKNTWVFGGGTKVTVL

SEQ ID NO: 1268 - protein, 121 aa, Artificial Sequence
  No. 64  HC variable region
EVQLVESGGGVVQPGRSLRLSCAASGFTFSSSPMHWVRQAPGKGLEWVAVISYDGSNKYYADSVKGRFTISRDNAKNTLYLQMNSLRAEDTAVYYCAREIALNNYYGMDVWGQGTTVTVSS

SEQ ID NO: 1269 - protein, 108 aa, Artificial Sequence
  No. 65  LC variable region
ELTLTQSPGTLSLSPGERATLSCRASQSVSSSYLAWYQQKPGQAPRLLIYGASSRATGIPDRFSGSGSGTDFTLTISRLEPEDFAVYYCQQYGSSPFTFGPGTKVEIK

SEQ ID NO: 1270 - protein, 121 aa, Artificial Sequence
  No. 65  HC variable region
EVQLVESGGGVVQPGRSLRLSCAASGFTFSSSPMHWVRQAPGKGLEWVAVISYDGSNKYYADSVKGRFTISRDNSKNTLYLQMNSLRAEDTAVYYCAREIALNNYYGMDVWGQGTTVTVSS

SEQ ID NO: 1271 - protein, 110 aa, Artificial Sequence
  No. 66  LC variable region
ELELTQPPSVSGSPGQSITISCTGTSSDVGGYNYVSWYQQHPGKAPKLMIYDVSNRPSGVSNRFSGSKSGNTASLTISGLQAEDEADYYCSSYTSSSTWVFGGGTKVTVL

SEQ ID NO: 1272 - protein, 121 aa, Artificial Sequence
  No. 66  HC variable region
EVQLVESGGGVVQPGRSLRLSCATSGFTFSSSPMHWVRQAPGKGLEWVAVISYDGSNKYYADSVKGRFTISRDNSKNTLYLQMNSLRAEDTAVYYCAREIALNNYYGMDVWGQGTTVTVSS

SEQ ID NO: 1273 - protein, 109 aa, Artificial Sequence
  No. 67  LC variable region
ELTLTQSPGTLSLSPGERATLSCRASQSVSSSYLAWYQQKPGQAPRLLIYGASSRATGIPDRFSGSGSGTDFTLTISRLEPEDFAVYYCQQYGSSPALTFGGGTKVDIK

SEQ ID NO: 1274 - protein, 121 aa, Artificial Sequence
  No. 67  HC variable region
EVQLLESGGGVVQPGRSLRLSCAASGFTFSSSPMHWVRQAPGKGLEWVAVISYDGSNKYYADSVKGRFTISRDNSKNTLYLQMNSLRAEDTAVYYCAREIALNNYYGMDVWGQGTTVTVSS

SEQ ID NO: 1275 - protein, 110 aa, Artificial Sequence
  No. 68  LC variable region
ELVVTQPPSVSAAPGQKVTISCSGSSSNIGNNYVSWYQQLPGTAPKLLIYDNNKRPSGIPDRFSGSKSGTSATLGITGLQTGDEADYYCGTWDSSLSAWVFGGGTQLTVL

SEQ ID NO: 1276 - protein, 120 aa, Artificial Sequence
  No. 68  HC variable region
QVQLVQSGAEVKKPGSSVRLSCKASGGPFERKVIAWVRQAPGQGLEWVGGHAPFVRKPTYARKFQGRVTLTADDSTSTAFMEFSSLRSDDTAVYFCATKAVTTYSGFDNWGQGTLVFVSA

SEQ ID NO: 1277 - protein, 110 aa, Artificial Sequence
  No. 69  LC variable region
ELELTQPPSVSGSPGQSITISCTGTSSDVGGYNNVSWYQQHPGKAPKLMIYDVSKRPSGVSNRFSGSKSGNTASLTISGLQAEDEADYYCSSYTSSSPWVFGGGTQLTVL

SEQ ID NO: 1278 - protein, 126 aa, Artificial Sequence
  No. 69  HC variable region
QVQLVQSGAEVKKPGSSVKVSCKASGGIFSSYAISWVRQAPGQGLEWMGGIIPMFGTTNYAQKFQGRVTITADESTSTAYMELSSLRSEDTAVYYCARDPTSRSTYYYYSGSYYPWGQGTLVTVSS

SEQ ID NO: 1279 - protein, 110 aa, Artificial Sequence
  No. 70  LC variable region
ELALTQPPSVSGSPGQSITISCTGTSTDVGGYNYVSWYQQHPGKAPKLMIYDVSKRPSGVSNRFSGSKSGSTASLTISGLQAEDEADYYCSSYTSSSTLVFGGGTKVTVL

SEQ ID NO: 1280 - protein, 120 aa, Artificial Sequence
  No. 70  HC variable region
QVQLVQSGGGVVQPGRSLRLSCAASGFTFSNYGMHWVRQAPGKGLEWVAVMSYDGSNKYYADSVKGRFTISRDNSKNRLYLQMNSLRAEDTAVYYCAKPDDSSGYYPDYWGQGTLVTVSS

SEQ ID NO: 1281 - protein, 110 aa, Artificial Sequence
  No. 71  LC variable region
ELALTQPPSVSGSPGQSITISCTGTSSDVGGYNYVSWYQQHPGKAPKLMIYDVSKRPSGVSNRFSGSKSGNTASLTISGLQAEDEADYYCSSYTSSRTWVFGGGTKLTVL

SEQ ID NO: 1282 - protein, 122 aa, Artificial Sequence
  No. 71  HC variable region
EVQLVESGGGLVQPGGSLRLSCAASGFTFSGYAMHWVRQAPGKGLEWVAVISYDGSHKNYADSVKGRFTISRDNSKNTLFLQMNSLRVEDTAVYYCARDNCGGDCGGGMDVWGQGTTVTVSS

SEQ ID NO: 1283 - protein, 110 aa, Artificial Sequence
  No. 72  LC variable region
ELQMTQSPSVSGAPGQRVTISCSGSSSNIGSNAVNWYQQLPGTAPKLLIYSNSYRPSGVSDRFSGSKSGTSASLAITGLRPEDEADYYCQSYDSALRGPLFGGGTKVDIK

SEQ ID NO: 1284 - protein, 125 aa, Artificial Sequence
  No. 72  HC variable region
EVQLVQSGAEVKKPGSSVKVSCKASGGTFSSYGISWMRQAPGQGLEWMGGIIPILATTKFAQKFQGRVTITADESTSTTYMELSSLRSDDTAVYYCARGWGLRLFGEFSVWFDPWGLGTLVTVSS

SEQ ID NO: 1285 - protein, 111 aa, Artificial Sequence
  No. 73  LC variable region
ELVLTQPPSVSGAPGQRVTISCTGSSSNIGAGYDVHWYQQLPGTAPKLLIYGNSNRPSGVPDRFSGSKSGTSASLAITGLQAEDEADYYCQSYDSSLSDVVFGGGTQLTVL

SEQ ID NO: 1286 - protein, 125 aa, Artificial Sequence
  No. 73  HC variable region
EVQLVQSGAEVKKPGSSVKVSCKASGGTFGSYGISWMRQAPGQGLEWMGGIIPILATTKFAQKFQGRVTITADESTSTTYMELSSLRSDDTAVYYCARGWGLRLFGEFSVWFDPWGLGTLVTVSS

SEQ ID NO: 1287 - protein, 110 aa, Artificial Sequence
  No. 74  LC variable region
ELALTQPPSVSGSPGQSITISCTGTSSDVGGYNYVSWYQQHPGKAPKLMIYDVSKRPSGVSNRFSGSKSGNTASLTISGLQAEDEADYYCSSYTSSSTWVFGGGTELTVL

SEQ ID NO: 1288 - protein, 122 aa, Artificial Sequence
  No. 74  HC variable region
QVQLQESGGGVVQPGRSLRLSCAASGFTFSSYAMHWVRQAPGKGLEWVAVISYDGSHKNYADSVKGRFTISRDNSKNTLFLQMNSLRVEDTAVYYCARDNCGGDCGGGMDVWGQGTTVTVSS

SEQ ID NO: 1289 - protein, 111 aa, Artificial Sequence
  No. 75  LC variable region
ELVVTQEPSLTVSPGGTVTLTCSSSTGAVTRGHFPNWLQQKPGQTPRALIHSTSNKHSWTPARFSGSLLGDKAALTLSGVQPEDEAEYYCLLYDAGAPGWVFGGGTKVTVL

SEQ ID NO: 1290 - protein, 121 aa, Artificial Sequence
  No. 75  HC variable region
EVQLVESGGGVVQPGRSLRLSCAASGFTFSSYPMHWVRQAPGKGLEWVAVISYDGSLKYYVDSVKGRFTISRDNSKNTLYLQMNSLRAEDTAVYYCARDSSCSGGSCFDYWGQGTLVTVSS

SEQ ID NO: 1291 - protein, 110 aa, Artificial Sequence
  No. 76  LC variable region
ELVLTQPPSASGTPGQRVTISCSGSSSNIGSNTVNWYQQLPGTAPKLLIYGNSNRPSGVPDRFSGSKSGTSASLAITGLQAEDEADYYCQSYDSSLSGVVFGGGTQLTVL

SEQ ID NO: 1292 - protein, 125 aa, Artificial Sequence
  No. 76  HC variable region
EVQLVESGAEVKKPGSSVKVSCKASGGTFSSYGISWMRQAPGQGLEWMGGIIPILATTKFAQKFQGRVTITADESTSTTYMELSSLRSDDTAVYYCARGWGLRLFGEFSVWFDPWGLGTLVTVSS

SEQ ID NO: 1293 - protein, 112 aa, Artificial Sequence
  No. 77  LC variable region
ELELTQPPSVSAAPGQKVTISCSGSSSNIGNNYVSWYQQLPGTAPKLLIFDNNKRPSGIPDRFSGSKSGTSATLGITGLQTGDEADYYCGAWDSSLSTPNWVFGGGTKLTVL

SEQ ID NO: 1294 - protein, 121 aa, Artificial Sequence; identical to SEQ ID NO: 1290
  No. 77  HC variable region

SEQ ID NO: 1295 - protein, 110 aa, Artificial Sequence
  No. 78  LC variable region
ELVVTQPPSVSAAPGQKVTISCSGSSSNIGNNYVSWYQQLPGTAPKLLIYDNNKRPSGIPDRFSGSKSGTSATLGITGLQTGDEADYYCGTWDSSLSAGVFGGGTKVTVL

SEQ ID NO: 1296 - protein, 127 aa, Artificial Sequence
  No. 78  HC variable region
QVQLVQSGAEVKKPGESLKISCKGSGYRFSSNWIAWVRQMPGKGLEWMGIIYPGDSDTRNSPSFQGQVTMSADKSISTAYLQWSSLKASDSAMYYCARLAYFHPQRNGGYEYYFDYWGQGTLVTVSP

SEQ ID NO: 1297 - protein, 111 aa, Artificial Sequence
  No. 79  LC variable region
ELELTQPPSVSGAPGQRVTISCTGSSSNIGAGYDVHWYQQLPGTAPKLLIYGNSNRPSGVPDRFSASKDAASAYLTITGLQAEDEGDYYCQSYDSRLRAVVFGGGTQLTVL

SEQ ID NO: 1298 - protein, 125 aa, Artificial Sequence
  No. 79  HC variable region
QVQLVQSGAEVKKPGASVKVSCKASGYTFTTQYLHWVRQAPGQGLEWMGIINPYGGSTTYAQKFQGRVTMTRDTSTSTVYMELSSLRSEDTAVYYCARSPSGYYGDYEGDAFDIWGQGTMVTVSS

SEQ ID NO: 1299 - protein, 110 aa, Artificial Sequence; identical to SEQ ID NO: 1149
  No. 80  LC variable region

SEQ ID NO: 1300 - protein, 126 aa, Artificial Sequence
  No. 80  HC variable region
QVQLVQSGAEVKKPGSSVKVSCKASGGTFSSYVISWVRQAPGQGLEWVGRIIPIFGTVKYAQKFQGRVTITADKSTSTAYMELSSLRSEDTAVYYCARDLPGDSRDGYNYDAFDIWGQGTLVTVSL

SEQ ID NO: 1301 - protein, 110 aa, Artificial Sequence
  No. 81  LC variable region
ELVLTQPPSASGTPGQRVTISCSGSSSNIGSNTVNWYQQLPGTAPKLLIYSNNQRPSGVPDRFSGSKSGTSASLAISGLQSEDEADYYCAAWDDSLNGWVFGGGTQLTVL

SEQ ID NO: 1302 - protein, 127 aa, Artificial Sequence
  No. 81  HC variable region
QVQLVQSGGGVVQPGRSLRLSCAASGFTFSSFAMHWVRQAPGKGLEWVAVISFDGSNKYYADSVKGQFTISRDNSKNTLYLQMNSLRAEDTAVYYCARGDYYGSGSYYNPSPFFDYWGQGTLVTVSS

SEQ ID NO: 1303 - protein, 110 aa, Artificial Sequence
  No. 82  LC variable region
ELELTQPPSVSGTPGQRVTISCSGSSSNIGSNYVYWYQQLPGTAPKLLIYRNNQRPSGVPDRFSGSKSGTSASLAISGLRSEDEADYYCAAWDDSLSGRVFGGGTKVTVL

SEQ ID NO: 1304 - protein, 131 aa, Artificial Sequence
  No. 82  HC variable region
QVQLVQSGAEVKKPGSSVKVSCKASGGTFSSYAISWVRQAPGQGLEWMGGIIPIFGTANYAQKFQGRVTITADESTSTAYMELSSLRSEDTAVYYCARDGVVVPAVMYDTTDPYYYGMDVWGQGTTVTVSS

SEQ ID NO: 1305 - protein, 110 aa, Artificial Sequence
  No. 83  LC variable region
ELELTQPPSVSGTPGQRVTISCSGSSSNIGSNTVNWYQQLPGTAPKLLIYNNNQRPSGVPDRFSGSKSGTSASLAISGLQSEDEADYYCAAWDDSLNGVVFGGGTKVTVL

SEQ ID NO: 1306 - protein, 119 aa, Artificial Sequence
  No. 83  HC variable region
EVQLVQSGAEVKKPGESLKISCKGSGYSFTSYWIGWVRQMPGKGLEWMGIIYPGDSDTRYSPSFQGQVTISADKSISTAYLQWSSLKASDTAMYYCARGPNIYNWFDSWGQGTLVTVSS

SEQ ID NO: 1307 - protein, 109 aa, Artificial Sequence
  No. 84  LC variable region
ELVLTQSPATLSLSPGERATLSCRASQSVSSYLAWYQQKPGQAPRLLIYDASNRATGIPARFSGSGSGTDFTLTISSLEPEDFAVYYCQQRRNWPPVLTFGQGTKVEIK

SEQ ID NO: 1308 - protein, 122 aa, Artificial Sequence
  No. 84  HC variable region
QVQLVQSGAEVKKPGSSVKVSCKASGGTFSSYAISWVRQAPGQGLEWMGGIIPIFGTANYAQKFQGRVTITADESTSTAYMELSSLRSEDTAVYYCARVEGYDSSGYYLDYWGQGTLVTVSS

SEQ ID NO: 1309 - protein, 110 aa, Artificial Sequence
  No. 85  LC variable region
ELGQTQQLSVSAAPGQKVTISCSGSSSNIGNNYVSWYQQLPGTAPKLLIYDNNKRPSGIPDRFSGSKSGTSATLGITGLQTGDEADYYCGTWDSSLSAGVFGGGTKLTVL

SEQ ID NO: 1310 - protein, 128 aa, Artificial Sequence
  No. 85  HC variable region
EVQLVQSGGGVVQPGRSLRLSCAASGLTFSDYGMHWVRQAPGKGLEWVAAISYDGSNKYYADSVKGRFTISRDNSKNTVYLQMNSLRAEDTAVYYCARDSGLYGSGWSTYQYYAMDVWGQGTTVTVSS

SEQ ID NO: 1311 - protein, 109 aa, Artificial Sequence
  No. 86  LC variable region
ELVLTQSPATLSLSPGERATLSCRASQSVSTFLAWYQQKPGQAPRLLIYDASNRATGIPARFSGSGSGTDFTLTISSLEPEDFAVYYCQQRSNWPPRITFGQGTRLEIK

SEQ ID NO: 1312 - protein, 122 aa, Artificial Sequence
  No. 86  HC variable region
EVQLVQSGAEVKKPGSSVKVSCKASGGTFSSYAISWVRQAPGQGLEWMGGIIPIFGTANYAQKFQGRVTITADESTSTAYMELSSLRSEDTAVYYCARVTGYDSSGYYQDYWGQGTLVTVSS

SEQ ID NO: 1313 - protein, 107 aa, Artificial Sequence
  No. 87  LC variable region
ELQMTQSPSSLSASVGDRVTITCRASQSISSYLNWYQQKPGKAPNLLIYAASSLQSGVPSRFSGSGSGTDFTLTISSLQPEDFATYYCQQSYSTPFTFGQGTRLEIK

SEQ ID NO: 1314 - protein, 121 aa, Artificial Sequence
  No. 87  HC variable region
EVQLVESGGGLVQPGGSLRLSCAASGFTFSSYAMHWVRQAPGKGLEWVAVISYDGINKYYADSVKGRFTISRDNSKNTLYLQMNSLKPEDTAVYYCARALGGNYYYGMDVWGQGTTVTVSS

SEQ ID NO: 1315 - protein, 109 aa, Artificial Sequence
  No. 88  LC variable region
ELTLTQSPATLSLSPGERATLSCRASQSVSSYLAWYQQKPGQAPRLLIYDASNRATGIPARFSGSGSGTDFTLTISSLEPEDFAVYYCQQRSNWPPKYTFGQGTKVEIK

SEQ ID NO: 1316 - protein, 122 aa, Artificial Sequence
  No. 88  HC variable region
EVQLVQSGAEVKKPGSSVRVSCKASGGTFSSYAISWVRQAPGQGLEWMGGIIPIFGTANYAQKFQGRVTITADESTSTAYMELSSLRSEDTAVYYCARVTGYDSSGYYQEYWGQGTLVTVSP

SEQ ID NO: 1317 - protein, 106 aa, Artificial Sequence
  No. 89  LC variable region
ELQMTQSPSSLSASVGDRVTITCRASQSISSYLNWYQQKPGKAPKLLIYKASSLESGVPSRFSGSGSGTDFTLTISSLQPEDFATYYCQQSYSTWTFGQGTKVEIK

SEQ ID NO: 1318 - protein, 121 aa, Artificial Sequence
  No. 89  HC variable region
EVQLLESGGSVVQPGRSLRLSCAASGFTFSSYAMHWVRQAPGKGLEWVAVISYDGSNKYYADSVKGRFTISRDNSKNTLYLQMNSLRAEDTAVYYCARARGGSYLYGMDVWGQGTTVTVSS

SEQ ID NO: 1319 - protein, 109 aa, Artificial Sequence
  No. 90  LC variable region
ELVLTQSPATLSLSPGERATLSCRASQSVSSYLAWYQQKPGQAPRLLIYDASNRATGIPARFSGSGSGTDFTLTISSLQPEDFAVYYCQQRRNWPPRITFGQGTRLEIK

SEQ ID NO: 1320 - protein, 122 aa, Artificial Sequence; identical to SEQ ID NO: 1308
  No. 90 HC variable region

SEQ ID NO: 1321 - protein, 110 aa, Artificial Sequence
  No. 91  LC variable region
ELVLTQPPSVSAAPGQKVTISCSGSSSNIGNSYVSWYQQLPGTAPKLLIYDNNKRPSGIPDRFSGSKSGTSATLGITGLQTGDEADYYCGTWDSSLSAWVFGGGTKVTVL

SEQ ID NO: 1322 - protein, 117 aa, Artificial Sequence
  No. 91  HC variable region
EVQLVQSGAEVKKPGASVKVSCKASGYTFTSYYMHWVRQAPGQGLEWLGIINRSGGSTIYAQTFQGRVTMTRDTSTSTVYMEMSSLTSEDTAVYYCARGGRHSLDVWGKGTTVTVSS

SEQ ID NO: 1323 - protein, 111 aa, Artificial Sequence
  No. 92  LC variable region
ELVVTQPPSVSGAPGQRVTISCTGSSSNIGAGYDVHWYQQLPGTAPKLLIYGNSNRPSGVPDRFSGSKSGTSASLAISGLRSEDEADYYCAAWDDSLGGPVFGGGTKVTVL

SEQ ID NO: 1324 - protein, 121 aa, Artificial Sequence
  No. 92  HC variable region
EVQLLESGGGVVQPGRSLRLSCAASGFIFGTYGMHWVRQAPGKGLEWVGVISYDGFNKYYADSVKGRFTISRDNSKNTLYLQMNSLRAEDTAVYYCARSLGGNYYYGMDVWGQGTTVTVSS

SEQ ID NO: 1325 - protein, 109 aa, Artificial Sequence
  No. 93  LC variable region
ELVLTQSPATLSLSPGERATLSCRASQSVSSFLAWYQQKPGQAPRLLIYDASNRATGIPARFSGSGSGTDFTLTISSLEPEDFAVYYCQQRSNWPPKLTFGGGTKVEIK

SEQ ID NO: 1326 - protein, 122 aa, Artificial Sequence
  No. 93  HC variable region
QVQLVQSGAEVKKPGSSVKVSCKASGGTFSSYAISWVRQAPGQGLEWMGGIIPIFGTANYAQKFQGRVTITADESTSTAYMELSSLRSEDTAVYYCARVSGYDSSGYYQDYWGQGTLVTVSS

SEQ ID NO: 1327 - protein, 110 aa, Artificial Sequence
  No. 94  LC variable region
ELQMTQSPSASGTPGQRVTISCSGSSSNIGSNTVNWYQQLPGTAPKLLIYSNNQRPSGVPDRFSGSKSGTSASLAISGLQSEDEADYYCAAWDDSLNGWVFGGGTKLEIK

SEQ ID NO: 1328 - protein, 121 aa, Artificial Sequence
  No. 94  HC variable region
QVQLVQSGGGVVQPGRSLRLSCAASGFIFGTYGMHWVRQAPGKGLEWVGVISYDGFNKYYADSVKGRFTISRDNSKNTLYLQMNSLRAEDTAVYYCARSLGGNYYYGMDVWGQGTTVTVSS

SEQ ID NO: 1329 - protein, 110 aa, Artificial Sequence
  No. 95  LC variable region
ELVLTQPPSVSAAPGQKVTISCSGSSSNIGSNTVSWYQQLPGTAPKLLIYSNNQRPSGVPDRFSGSKSGTSASLAISGLQSEDEADYYCAAWDDSLNGVVFGGGTKLTVL

SEQ ID NO: 1330 - protein, 128 aa, Artificial Sequence
  No. 95  HC variable region
QVQLQQWGAGLLKPSETLSLTCAVYDGSFSGYYWSWIRQPPGKGLEWIGEINHSGSTNYNPSLKSRVTISVDTSKNQFSLKLNSVTAADTALYYCARGRYSSNWYEAWTPRGIGMDVWGQGTTVTVSS

SEQ ID NO: 1331 - protein, 106 aa, Artificial Sequence
  No. 96  LC variable region
ELQMTQSPSSLSASVGDRVTITCRASQSISSYLNWYQQKPGKAPKLLIYAASSLQSGVPSRFSGSGSGTDFTLTISSLQPEDFATYYCQQSYSTWTFGQGTKVEIK

SEQ ID NO: 1332 - protein, 121 aa, Artificial Sequence
  No. 96  HC variable region
EVQLLESGGGVVQPERSLRLSCAASGFTFSSYAMHWVRQAPGKGLEWVAVISYDGINKYYADSVKGRFTISRDNSKNTLYLQMNSLKPEDTAVYYCARALGGNYYYGMDVWGQGTTVTVSS

SEQ ID NO: 1333 - protein, 106 aa, Artificial Sequence
  No. 97  LC variable region
ELQMTQSPSSLSASVGDRVTITCQASQDISSYLNWYQQKPGKAPKLLIYAASSLQSGVPSRFSGSGSGTDFTLTISSLQPEDFATYYCQQSYSTWTFGQGTKVEIK

SEQ ID NO: 1334 - protein, 121 aa, Artificial Sequence
  No. 97  HC variable region
EVQLLESGGGVVQPGRSLRLSCAASGFTFSSYAMHWVRQAPGKGLEWVAVISYDGSNKYYADSVKGRFTISRDNSKNTLYLQMNSLRAEDTAVYYCARARGGSYLYGMDVWGQGTTVTVSS

SEQ ID NO: 1335 - protein, 107 aa, Artificial Sequence
  No. 98  LC variable region
ELQMTQSPSSLSASVGDRVTITCRASQSISSYLNWYQQKPGKAPKLLIYAASSLQSGVPSRFSGSGSGTDFTLTISSLQPEDFATYYCQQSYSNPFTFGQGTRLEIK

SEQ ID NO: 1336 - protein, 121 aa, Artificial Sequence; identical to SEQ ID NO: 1332
  No. 98  HC variable region

SEQ ID NO: 1337 - protein, 109 aa, Artificial Sequence
  No. 99  LC variable region
ELVMTQSPATLSLSPGERATLSCRASQSVSSYLAWYQQKPGQAPRLLIYDASNRATGIPARFSGSGSGTDFTLTISSLEPEDFAVYYCQQRSNWPPMYTFGQGTKLEIK

SEQ ID NO: 1338 - protein, 122 aa, Artificial Sequence; identical to SEQ ID NO: 1260
  No. 99  HC variable region

SEQ ID NO: 1339 - protein, 110 aa, Artificial Sequence
  No. 100  LC variable region
ELELTQPPSVSGAPGQRVTISCTGSRSNIGINSVNWYQQLPGTAPKLLIYSNNQRPSGVLDRFSGSKSGTSASLAISELQSEDEADYYCAAWDDSLNGYVFGTGTKLTVL

SEQ ID NO: 1340 - protein, 128 aa, Artificial Sequence; identical to SEQ ID NO: 1166
  No. 100  HC variable region

SEQ ID NO: 1341 - protein, 112 aa, Artificial Sequence
  No. 101  LC variable region
ELALTQPPSVSGSPGQSITISCTGTSSDIGGYNYVSWYQQHPGKAPKLMIYAVSKRPSGVSNRFSGSKSGNTASLTISGLQAEDEGDYFCSSYTSSSGTLNVFGTGTKVTVL

SEQ ID NO: 1342 - protein, 121 aa, Artificial Sequence; identical to SEQ ID NO: 1328
  No. 101  HC variable region

SEQ ID NO: 1343 - protein, 110 aa, Artificial Sequence
  No. 102  LC variable region
ELVLTQPPSVSAAPGQKVTISCSGSNSNIGNNFVSWYQQLPGTAPKLLIYDNNVRPSGIPDRFSGSKSGTSATLGITGLQTGDEADYYCAAWDTSLSSWVFGGGTKLTVL

SEQ ID NO: 1344 - protein, 117 aa, Artificial Sequence; identical to SEQ ID NO: 1144
  No. 102  HC variable region

SEQ ID NO: 1345 - protein, 107 aa, Artificial Sequence
  No. 103  LC variable region
ELQMTQSPSTLSASVGDRVTITCRASQSISSWLAWYQQKPGKAPKLLIYRASTLQSGVPSRFSGSGSGTEFTLTISSLQPDDFATYYCQQYKTYPLTFGGGTKVEIK

SEQ ID NO: 1346 - protein, 116 aa, Artificial Sequence
  No. 103  HC variable region
QVQLVQSGGGLVQPGGSLRLSCAASGFTFSSYGMHWVRQAPGKGLEWVAAIWHDGYNKYYADSVKGRFTISRDNSKNTLYLQMNSLRAEDTAVYYCARGSKAADYWGQGTLVIVSS

SEQ ID NO: 1347 - protein, 105 aa, Artificial Sequence
  No. 104  LC variable region
ELVLTQPPSVSVAPGKTARITCGGNNIGSKSVHWYQQKPGQAPVLVVYQDSKRPSGIPERFSGSNSGNTATLTISRVEAGDEADYYCQAWDSSTVFGGGTKLTVL

SEQ ID NO: 1348 - protein, 121 aa, Artificial Sequence
  No. 104  HC variable region
EVQLVQSGGGVVQPGRSLRLSCAASGFIFGTYGMHWVRQAPGKGLEWVGVISYDGFNKYYADSVKGRFTISRDNSKNTLYLQMNSLRAEDTAVYYCARSLGGNYYYGMDVWGQGTTVTVSS

SEQ ID NO: 1349 - protein, 109 aa, Artificial Sequence
  No. 105  LC variable region
ELTLTQSPATLSLSPGERATLSCRASQSVSSYLAWYQQKPGQAPRLLIYDASNRATGTPARFSGSGSGTDFTLTISSLEPEDFAVYYCQQRSNWPPMYTFGQGTRLEIK

SEQ ID NO: 1350 - protein, 122 aa, Artificial Sequence
  No. 105  HC variable region
EVQLVQSGAEVKKPGSSVKVSCKASGGTFSSYAISWVRQAPGQGLEWMGGIIPIFGTANYAQKFQGRVTITADESTSTAYMELSSLRSEDTAVYYCARVTGYDSSGYYQEYWGQGTLVTVSS

SEQ ID NO: 1351 - protein, 111 aa, Artificial Sequence
  No. 106  LC variable region
ELALTQPPSVSGSPGQSITISCTGTSSDVGGYNYVSWYQQHPGKAPKLMIYDVSNRPSGVSNRFSGSKSGNTASLTISGLQAEDEADYYCSSYTSSSTRYVFGTGTKVTVL

SEQ ID NO: 1352 - protein, 129 aa, Artificial Sequence
  No. 106  HC variable region
QITLKESGGGVVQPGRSLRLSCAGSGFTFSSYAMNWVRQAPGKGLEWVSAISGSGGTTYYADSVKGRFTISRDNSENTLYLQMNSLGAEDTAVYYCAKAPSDLSFIWTGYYSEYYFDYWGQGTLVTVSS

SEQ ID NO: 1353 - protein, 111 aa, Artificial Sequence; identical to SEQ ID NO: 1207
  No. 107  LC variable region

SEQ ID NO: 1354 - protein, 124 aa, Artificial Sequence
  No. 107  HC variable region
EVQLVESGAEVKKPGSSVKVSCKASGYTFTNYGISWVRQAPGQGLEWMGWISAYNGNTNYAQKLQGRVTMTTDTSTSTAYMELRSLRSDDTAVYYCARPRGYSGYGSNWYFDLWGRGTLVTVSS

SEQ ID NO: 1355 - protein, 109 aa, Artificial Sequence
  No. 108 LC variable region
ELVLTQSPGTLSLSPGERATLSCRASQSVSSFLAWYQHKPGQAPRLLIYDASNRATGIPARFSGSGSGTDFTLTISSLEPEDFAVYYCQQRSNWPPALTFGGGTKLEIK

SEQ ID NO: 1356 - protein, 122 aa, Artificial Sequence; identical to SEQ ID NO: 1312
  No. 108 HC variable region

SEQ ID NO: 1357 - protein, 107 aa, Artificial Sequence
  No. 109 LC variable region
ELQMTQSPSSLSASVGDRVTITCRTTQNINTYLNWYQQQPGKAPKLLIYAASRLQSGVPSRFSGTGSGTDFTLTITSVQPEDFATYYCQRSYSTPYTFGQGTKLEIK

SEQ ID NO: 1358 - protein, 121 aa, Artificial Sequence
  No. 109 HC variable region
EVQLVQSGGGVVQPGRSPRLSCAASGFTFSSYAMHWVRQAPGKGLEWLALISYDGNNKYYADSVKGRFTVSRDNSKNTLYLQMNSLRAEDTAVYYCARATYGSYYYGMDAWGLGTTVTVSS

SEQ ID NO: 1359 - protein, 110 aa, Artificial Sequence
  No. 110 LC variable region
ELELTQPPSVSGTPGQRVTISCSGSSSNIGSNTVNWYQQLPGTAPKLLIYSNNQRPSGVPDRFSGSKSGTSASLAISGLQSEDEADYYCAAWDDSLNGWVFGGGTKVTVL

SEQ ID NO: 1360 - protein, 115 aa, Artificial Sequence
  No. 110 HC variable region
EVQLLESGGGLVQPGGSLRLSCAASGFTFSNYAMNWVRQAPGKGLEWVSTISGSGGSTYYADSVKGRFTISRDNSKNTLFLQMNSLRAEDTAVYYCARGYALNPWGQGTLVTVSS

SEQ ID NO: 1361 - protein, 110 aa, Artificial Sequence
  No. 111  LC variable region
ELVVTQPPSASGTPGQRVTISCSGSSSNIGSNYVSWYQQLPGTAPKLLIYDNNKRPSGIPDRFSGSKSGTSATLGITGLQTGDEADYYCGTWDSSLSAWVFGGGTKLTVL

SEQ ID NO: 1362 - protein, 117 aa, Artificial Sequence; identical to SEQ ID NO: 1144
  No. 111  HC variable region

SEQ ID NO: 1363 - protein, 110 aa, Artificial Sequence
  No. 112  LC variable region
ELVVTQPPPVSAAPGQKVTISCSGSSSNIGNNYVSWYQQLPGTAPKLLIYDNNKRPSGIPDRFSGSKSGTSATLGITGLQTGDEADYYCGTWDSSLSAYVFGTGTKLTVL

SEQ ID NO: 1364 - protein, 117 aa, Artificial Sequence
  No. 112  HC variable region
QVQLVQSGAEVKKPGASVKVSCKASGYTFSSYYMHWVRQAPGQGLEWMGIINRSGGSTIYAQTFQGRVTMTRDTSTSTVYMEMSSLTSEDTAVYYCARGGRHSLDVWGKGTTVTVSS

SEQ ID NO: 1365 - protein, 110 aa, Artificial Sequence
  No. 113  LC variable region
ELVVTQPPSVSAAPGQKVTISCSGSSSNIGNNYVSWYQQLPGTAPKLLIYDNSRRPSGIPDRFSGSKSGTSATLGITGLQTGDEADYYCGTWDSSLSAWVFGGGTKLTVL

SEQ ID NO: 1366 - protein, 117 aa, Artificial Sequence; identical to SEQ ID NO: 1144
  No. 113  HC variable region

SEQ ID NO: 1367 - protein, 110 aa, Artificial Sequence
  No. 114  LC variable region
ELELTQPPSVSAAPGRKVTISCSGSSSNIGNNYVSWYQQLPGTAPKLLIYRNNQRPSGVPDRFSGSKSGTSASLAISGLRSEDEADYYCAAWDDSLSAWVFGGGTKLTVL

SEQ ID NO: 1368 - protein, 117 aa, Artificial Sequence; identical to SEQ ID NO: 1144
  No. 114  HC variable region

SEQ ID NO: 1369 - protein, 111 aa, Artificial Sequence
  No. 115  LC variable region
ELVLTQPPSVSAAPGQKVTISCSGSSSNIGNNYVSWYQQLPGTAPKLLIYDNNKRPSGIPDRFSGSKSGTSATLGITGLQTGDEADYYCGTWDSSLSAYWVFGGGTKVTVL

SEQ ID NO: 1370 - protein, 117 aa, Artificial Sequence
  No. 115  HC variable region
EVQLMQSGAEVKKPGSSVKVSCKASGGTFTSYYMHWVRQAPGQGLEWLGIINRSGGSTIYAQTFQGRVTMTRDTSTSTVYMEMSSLTSEDTAVYYCARGGRHSLDVWGKGTTVTVSS

SEQ ID NO: 1371 - protein, 110 aa, Artificial Sequence
  No. 116  LC variable region
ELVMTQSPSVSAAPGQKVTISCSGSSSNIGNNYVSWYQQLPGTAPKLLIYDNNKRPSGIPDRFSGSKSGTSATLGITGLQTGDEADYYCGTWDSSLSAWVFGGGTKLEIK

SEQ ID NO: 1372 - protein, 117 aa, Artificial Sequence
  No. 116  HC variable region
QVQLVQSGAEVKKPGASVKVSCKASGYTFTSYYMHWVRQAPGQGLEWLGIINRSGGSTIYAQTFQSRVTMTRDTSTSTVYMEMSSLTSEDTAVYYCARGGRHSLDVWGKGTTVTVSS

SEQ ID NO: 1373 - protein, 110 aa, Artificial Sequence
  No. 117  LC variable region
ELELTQPPSVSGAPGQRVTISCSGSSSNIGNNYVSWYQQLPGTAPKLLIYDNNKRPSGIPDRFSGSKSGTSASLAISGLQSEDEADYYCAAWDDSLNGPVFGGGTKLTVL

SEQ ID NO: 1374 - protein, 124 aa, Artificial Sequence
  No. 117  HC variable region
QVQLVQSGGGLVQSGGSLRLSCAASGFPLSRYAMSWVRRAPGKGLEWVSAISGSGGSTYYADSVKGRFTISRDNSKNTLYLQMNSLRAEDTAVYYCAKVRYYDFWSGWDVMDVWGQGTTVTVSS

SEQ ID NO: 1375 - protein, 110 aa, Artificial Sequence
  No. 118  LC variable region
ELVLTQPPSVSAAPGQKVTISCSGSSSSIGNNYVSWYQQLPGTAPKLLIYDNNKRPSGIPDRFSGSKSGTSATLGITGLQTGDEADYYCGTWDSSLSAWVFGGGTKVTVL

SEQ ID NO: 1376 - protein, 117 aa, Artificial Sequence; identical to SEQ ID NO: 1144
  No. 118  HC variable region

SEQ ID NO: 1377 - protein, 110 aa, Artificial Sequence
  No. 119  LC variable region
ELVLTQPPSVSAAPGQKVTISCSGSSSNIGNNYVSWYQQLPGTAPKLLIYDNNVRPSGIPDRFSGSKSGTSATLGITRLQTGDEADYYCAAWDTSLSSWVFGGGTKLTVL

SEQ ID NO: 1378 - protein, 117 aa, Artificial Sequence
  No. 119  HC variable region
QVQLVQSGAEVKKPGASLKVSCKASGYAFTSYYMHWVRQAPGQGLEWLGIINRSGGSTIYAQTFQGRVTMTRDTSTSTVYMEMSSLTSEDTAVYYCARGGRHSLDVWGKGTTVTVSS

SEQ ID NO: 1379 - protein, 110 aa, Artificial Sequence
  No. 120  LC variable region
ELELTQPPSVSAAPGQKVTISCSGSSSNIGNNYVSWYQQLPGTAPKLLIYDNNQRPSGIPDRFSGSKSGTSATLGITGLQTGDEADYYCGTWDTSLSAWVFGGGTKLTVL

SEQ ID NO: 1380 - protein, 117 aa, Artificial Sequence; identical to SEQ ID NO: 1264
  No. 120  HC variable region

SEQ ID NO: 1381 - protein, 110 aa, Artificial Sequence
  No. 121  LC variable region
ELVVTQPPSVSAAPGQKVTISCSGSSSNIGRNYVSWYQQLPGTAPKLLIYDNNRRPSGIPDRFSGSKSGTSATLGITGLQTGDEADYYCGTWDSSLSAVAFGGGTKLTVL

SEQ ID NO: 1382 - protein, 117 aa, Artificial Sequence
  No. 121  HC variable region
QVQLVQSGAEVKKPGASVKVSCKASGYTFTSYYMHWVRQAPGQGLEWMGIINPSGGSTSYAQKFQGRVTMTRDTSTSTVYMELSSLRSEDTAVYYCARGGDHGMDVWGQGTTVTVSS

SEQ ID NO: 1383 - protein, 110 aa, Artificial Sequence
  No. 122  LC variable region
ELELTQPPSVSGTPGQRVTISCSGSSSNIGSNTVNWYQQLPGTAPKLLIYSNNQRPSGVPDRFSGSKSGTSASLAISGLQSEDEADYYCAAWDDSLNGTVFGGGTKVTVL

SEQ ID NO: 1384 - protein, 128 aa, Artificial Sequence; identical to SEQ ID NO: 1166
  No. 122  HC variable region

SEQ ID NO: 1385 - protein, 106 aa, Artificial Sequence
  No. 123  LC variable region
ELELTQPPSVSVSPGQTARITCSGDVLAKKYARWFQQKPGQAPVLVIYKDSERPSGIPERFSGSSSGTTVTLTISGAQVEDEADYYCYSAADNNGVFGGGTKLTVL

SEQ ID NO: 1386 - protein, 127 aa, Artificial Sequence; identical to SEQ ID NO: 1164
  No. 123  HC variable region

SEQ ID NO: 1387 - protein, 109 aa, Artificial Sequence
  No. 124  LC variable region
ELVLTQSPATLSLSPGERATLSCRASQSVSSYLAWYQQKPGQAPRLLIYDASNRATGIPARFSGSGSGTDFTLTISSLEPEDFAVYYCQQRSNWPPRITFGQGTRLEIK

SEQ ID NO: 1388 - protein, 122 aa, Artificial Sequence
  No. 124  HC variable region
EVQLVQSGAEVKKPGSSVKVSCKASGGTFSSYAISWVRQAPGQGLEWMGGIIPIFGTANYAQKFQGRVTITADESTSTAYMELSSLRSEDTAVYYCARVTGYDGSGYYQDYWGQGTLVTVSS

SEQ ID NO: 1389 - protein, 110 aa, Artificial Sequence
  No. 125  LC variable region
ELELTQPPSVSGTPGQRVTISCSGSNSNIGSNTVNWYQQLPGTAPKLLIYSNNQRPSGVPDRFSGSKSGTSASLAISGLQSEDEADYYCAAWDDSLNGYVFGTGTKVTVL

SEQ ID NO: 1390 - protein, 124 aa, Artificial Sequence; identical to SEQ ID NO: 1222
  No. 125  HC variable region

SEQ ID NO: 1391 - protein, 109 aa, Artificial Sequence
  No. 126  LC variable region
ELTLTQSPGTLSLSPGERATLSCRASQSVSTYLSWYQQKPGQAPRLLIYDASNRATGIPARFSGSGSGTDFTLTISSLEPEDFAVYYCLQRSNWPPALTFGGGTKLEIK

SEQ ID NO: 1392 - protein, 122 aa, Artificial Sequence
  No. 126  HC variable region
EVQLVQSGAEVKKPGSSVKVSCKASGGTFSSYAISWVRQAPGQGLEWMGGIIPIFGTANYAQKFQGRVTITADESTSTAYMELSSLRSEDTAVYYCARASGYDSSGYYSDYWGQGTLVTVSS

SEQ ID NO: 1393 - protein, 109 aa, Artificial Sequence
  No. 127  LC variable region
ELTLTQSPGTLSLSPGERATLSCRASQSVSSFLAWYQQKPGQPPRLLIYDASNRATGIPARFSGSGSGTDFTLTISSLEPEDFAVYYCQQRSNWPPSITFGQGTRLEIK

SEQ ID NO: 1394 - protein, 122 aa, Artificial Sequence
  No. 127  HC variable region
QVQLVQSGAEVKKPGSSVKVSCKASGGTFSSYAISWVRQAPGQGLEWMGGIIPIFGTANYAQKFQGRVTITADESTSTAYMELSSLRSEDTAVYHCVRVGTYDSSGYSFDYWGQGTLVTVSS

SEQ ID NO: 1395 - protein, 110 aa, Artificial Sequence
  No. 128  LC variable region
ELVLTQPPSVSGAPGQRVTISCSGSSSNIGNNYVSWYQQLPGTAPKLLIYDNNKRPSGIPDRFSGSKSGTSASLAISGLQSEDEADYYCAAWDDSLNGVVFGGGTKVTVL

SEQ ID NO: 1396 - protein, 124 aa, Artificial Sequence
  No. 128  HC variable region
QVQLVQSGGGLVQSGGSLRLSCAASGFPLSRYAMSWVRRAPGKGLEWVSAISGSGGSTYYADSVKGRFTISRDNSKNTLYLQMNSLRAEDTAVYYCAKGPRGQDYGDYGFLDYWGQGTLVTVSS

SEQ ID NO: 1397 - protein, 111 aa, Artificial Sequence
  No. 129  LC variable region
ELELTQPPSVSGTPGQRVTISCSGSSSNIGSNTVDWYQQLPGTAPKLLIYNNNQRPSGVPDRFSGSKSGTSASLAISGLQSEDEDDYYCAAWDDSLNAPWVFGGGTKVTVL

SEQ ID NO: 1398 - protein, 121 aa, Artificial Sequence
  No. 129  HC variable region
QVQLVQSGGGVVQPGRSLRLSCAASGFTFSSYAMHWVRQAPGKGLEWVAVISYDGSNKYYADSVKGRFTISRDNSKNTLYLQMNSLRAEDTAVYYCARPRGGNYRGALDIWGQGTMVTVSS

SEQ ID NO: 1399 - protein, 108 aa, Artificial Sequence
  No. 130  LC variable region
ELTLTQSPGTLSLSPGERATLSCRASQSVSSYLAWYQQKPVQAPRLLIYDASNRATGIPARFSGSGSGTDFTLTISRLEPEDFAVYYCQQYGSSPPITFGQGTKVEIK

SEQ ID NO: 1400 - protein, 121 aa, Artificial Sequence
  No. 130  HC variable region
QVQLVQSGAEVKKPGSSVKVSCKASGAMFSSYAISWVRQAPGQGLEWMGGIIPIFGTTNYAQKFQGRVTITADESTSTAYMELSSLRSEDTAVYYCARDPTGWYSGYFDYWGQGTLVTVSS

SEQ ID NO: 1401 - protein, 110 aa, Artificial Sequence
  No. 131  LC variable region
ELELTQPPSVSGSPGQSITISCTGTSSDVGSYNLVSWYQQHPGKAPKLMIYDVSNRPSGVSNRFSGSKSGNTASLTISGLQAEDEADYYCSSYTSSSTLVFGGGTKLTVL

SEQ ID NO: 1402 - protein, 120 aa, Artificial Sequence; identical to SEQ ID NO: 1280
  No. 131  HC variable region

SEQ ID NO: 1403 - protein, 110 aa, Artificial Sequence
  No. 132  LC variable region
ELKLTQPPSVSGSPGQSITISCTGTSSDVGGYNYVSWYQQHPGKAPKLMIYDVSKRPSGVSNRFSGSKSGNTASLTISGLQAEDEADYYCSSYTTSSTWVFGGGTKLTVL

SEQ ID NO: 1404 - protein, 121 aa, Artificial Sequence
  No. 132  HC variable region
QVQLVQSGAEVKKPGASVKVSCKVSGYTLTELSIHWVRQAPGKGLEWMGGFDPEDAETIYAQKFQGRVTMTEDTSTDTAYMELSSLRSEDTAVYYCATSPAVTTAGWFDPCGQGTLVTVSS

SEQ ID NO: 1405 - protein, 110 aa, Artificial Sequence
  No. 133  LC variable region
ELELTQPPSVSGSPGDSITISCTGTRGDIGAYDGVSWYQQLPGKAPKLIIYAVTQRPSGISDRFSGSKSGNTASLTISGLQAEDEADYYCSSYTSSSSWVFGGGTKLTVL

SEQ ID NO: 1406 - protein, 121 aa, Artificial Sequence
  No. 133  HC variable region
QVQLVQSGAEVKKPGASVKVSCKVSGYTLPELSMHWVRQAPGKGLEWMGGFDPEDGETIYAQKFQGRVTMTEDTSTDTAYMELSSLRSEDTAVYYCAISPAIIRVDWFDPWGQGTLVTVSS

SEQ ID NO: 1407 - protein, 110 aa, Artificial Sequence; identical to SEQ ID NO: 1405
  No. 134  LC variable region

SEQ ID NO: 1408 - protein, 124 aa, Artificial Sequence
  No. 134  HC variable region
QVQLVQSGGGLVQSGGSLRLSCAASGFPLSRYAMSWVRQAPGKGLEWVSAISGSGGSTYYADSVKGRFTISRDNSKNTLYLQMNSLRAEDTAVYYCAKGPRGQDYGDYGFLDYWGQGTLVTVSS

SEQ ID NO: 1409 - protein, 110 aa, Artificial Sequence
  No. 135  LC variable region
ELALTQPPSVSGSPGQSITISCSGTSSDVGGYNYVSWYQQHPGKAPKLMIYDVSKRPSGVSNRFSGSKSGNTASLTISGLQAEDEADYYCSSYTSSSTWVFGGGTELTVL

SEQ ID NO: 1410 - protein, 122 aa, Artificial Sequence
  No. 135  HC variable region
EVQLVESGGGVVQPGRSLRLSCAASGFTFSSYAMHWVRQAPGKGLEWVAVISYDGSHKNYADSVKGRFTISRDNSKNTLFLQMNSLRVEDTAVYYCARDNCGGDCGGGMDVWGQGTTVTVSS

SEQ ID NO: 1411 - protein, 111 aa, Artificial Sequence
  No. 136  LC variable region
ELALTQPPSVSGSPGQSITISCTGTSSDVGGYNYVSWYQQHPGKAPKLMIYDVSKRPSGVSNRFSGSKSGNTASLTISGLQAEDKADYYCSSYTSSSTPWVFGGGTELTVL

SEQ ID NO: 1412 - protein, 122 aa, Artificial Sequence
  No. 136  HC variable region
QVQLVQSGGGVVQPGRSLRLSCAASGFTFSSYAMHWVRQAPGKGLEWVAVISYDGSHKNYADSVKGRFTISRDNSKNTLFLQMNSLRVEDTAVYYCARDNCGGDCGGGMDVWGQGTTVTVSS

SEQ ID NO: 1413 - protein, 110 aa, Artificial Sequence
  No. 137  LC variable region
ELALTQPPSVSGSPGQSITISCTGTNSDVGGYNYVSWYQHHPGKAPKLMIYDVTKRPSGVSNRFSGSKSGNTASLTISGLQAEDEADYYCSSYTSSSTWVFGGGTKLTVL

SEQ ID NO: 1414 - protein, 122 aa, Artificial Sequence
  No. 137  HC variable region
QVQLVQSGGGVVQPGRFLRLSCAASGFTFSSYAMHWVRQAPGKGLEWVAVISYDGSHKNYADSVKGRFTISRDNSKNTLFLQMNSLRVEDTAVYYCARDNCGGDCGGGMDVWGQGTTVTVSS

SEQ ID NO: 1415 - protein, 110 aa, Artificial Sequence
  No. 138  LC variable region
ELQMTQSPSVSGSPGQSITISCTGTSTDIGRYNYVSWYQQHPGKAPKLMIYDVSKRPSGVSNRFSGSKSGNTASLTISGLQAEDEADYYCSSYTSSSTYAFGTGTKVDIK

SEQ ID NO: 1416 - protein, 123 aa, Artificial Sequence
  No. 138  HC variable region
QVQLVQSGAEVKKPGASVKVSCKVSGYTLPEVAIHWVRQAPGKGLEWMGGFDPEDGETSYAQKFQGRVTMTEDTSTDTAYMELSSLRSEDTAVYYCATGPVLGLSKWLEFDPWGQGTLVTVSS

SEQ ID NO: 1417 - protein, 110 aa, Artificial Sequence
  No. 139  LC variable region
ELQMTQSPSVSGSPGQSITISCTGTSSDVGAYNYVSWYQHHPGKAPKLMIYDVSKRPSGVSNRFSGSKSGNTASLTISGLQAEDEADYYCNSYTSSSTWVFGGGTKVDIK

SEQ ID NO: 1418 - protein, 123 aa, Artificial Sequence; identical to SEQ ID NO: 1416
  No. 139  HC variable region

SEQ ID NO: 1419 - protein, 110 aa, Artificial Sequence
  No. 140  LC variable region
ELVVTQPPSVSAAPGQKVTISCSGSSSNIGNNYVSWYQQLPGTAPKLLIYDNNKRPSGIPDRFSGSKSGTSATLGITGLQTGDEADYYCGTWDSSLSAVVFGGGTKLTVL

SEQ ID NO: 1420 - protein, 124 aa, Artificial Sequence; identical to SEQ ID NO: 1408
  No. 140  HC variable region

SEQ ID NO: 1421 - protein, 110 aa, Artificial Sequence
  No. 141  LC variable region
ELELTQPPSVSAAPGQKVTISCSGSSSNIGNNYVSWYQQLPGTAPKLLIYDNNKRPSGIPDRFSGSKSGTSATLGITGLQTGDEADYYCEAWDSSLSAVLFGGGTKVTVL

SEQ ID NO: 1422 - protein, 124 aa, Artificial Sequence; identical to SEQ ID NO: 1408
  No. 141  HC variable region

SEQ ID NO: 1423 - protein, 110 aa, Artificial Sequence
  No. 142  LC variable region
ELVLTQPPSVSAAPGQKVTISCSGSSSNIGNNYVSWYQQLPGTAPKLLIYDNNKRPSGIPDRFSGSKSGTSATLGITGLQTGDEADYYCGTWDTSLSAGVFGGGTKVTVL

SEQ ID NO: 1424 - protein, 124 aa, Artificial Sequence; identical to SEQ ID NO: 1408
  No. 142  HC variable region

SEQ ID NO: 1425 - protein, 110 aa, Artificial Sequence
  No. 143  LC variable region
ELVLTQPPSVSAAPGQKVTISCSGSSSNIGNNYVSWYQQLPGTAPKLLIYDNNKRPSGIPDRFSGSKSGTSATLGITGLQTGDEADYYCGTWDSSLSDVVFGGGTKLTVL

SEQ ID NO: 1426 - protein, 124 aa, Artificial Sequence; identical to SEQ ID NO: 1408
  No. 143  HC variable region

SEQ ID NO: 1427 - protein, 110 aa, Artificial Sequence
  No. 144  LC variable region
ELVVTQPPSVSAAPGRKVTISCSGSSSNIGNNYVSWYQQLPGTAPKLLIYDNNKRPSGIPDRFSGSKSGTSATLGITGLQTGDEADYYCGTWDSSLSAGVFGGGTQLTVL

SEQ ID NO: 1428 - protein, 124 aa, Artificial Sequence; identical to SEQ ID NO: 1150
  No. 144  HC variable region

SEQ ID NO: 1429 - protein, 108 aa, Artificial Sequence
  No. 145  LC variable region
ELVLTQSPATLSLSPGERATLSCRASQSVSSSYLAWYQQKPGQAPRLLIYGASSRATGIPDRFSGSGSGTDFTLTISRLEPEDFAVYYCQQYGSSPPTFGGGTKLEIK

SEQ ID NO: 1430 - protein, 128 aa, Artificial Sequence
  No. 145  HC variable region
EVQLVQSGAEVKKPGSSVKVSCKASGGTFNNYVINWVRQAPGQGLEWMGGFIPVFGIADYAQKFQGRVTITADESTSTAYMELSSLRSEDTAVYYCARSGLFDWLLPRSRHRDYFDYWGQGTLVTVSS

SEQ ID NO: 1431 - protein, 110 aa, Artificial Sequence
  No. 146  LC variable region
ELGQTQQLSVSAAPGQKVTISCSGSSSNIGNNYVSWYQQLPGTAPKLLIYDNNKRPSGIPDRFSGSKSGTSASLAISGLQSEDEADYYCAAWDDSLNGWVFGGGTKLTVL

SEQ ID NO: 1432 - protein, 126 aa, Artificial Sequence; identical to SEQ ID NO: 1278
  No. 146  HC variable region

SEQ ID NO: 1433 - protein, 110 aa, Artificial Sequence
  No. 147  LC variable region
ELELTQPPSVSGTPGQRVTISCSGSGSNIGSNYVHWYQQLPGTAPKLLIYRNSQRPSGVPDRFSGSKSGTSASLAISGLRSEDEADYYCAAWDDSLSGWVFGGGTELTVL

SEQ ID NO: 1434 - protein, 126 aa, Artificial Sequence
  No. 147  HC variable region
QVQLVQSGAEVKKPGASVKVSCKASGGIFSSYAISWVRQAPGQGLEWMGGIIPMFGTTNYAQKFQGRVTITADESTSTAYMELSSLRSEDTAVYYCARDPTSRSTYYYYSGSYYPWGQGTLVTVSS

SEQ ID NO: 1435 - protein, 110 aa, Artificial Sequence
  No. 148  LC variable region
ELELTQPPSVSGTPGQRVTISCSGSSSNIGSNYVYWYQQLPRTAPKLLIYRNNQRPSGVPDRFSGSKSGTSASLAISGLRSEDEADYYCAAWDDSLSGWVFGGGTKLTVL

SEQ ID NO: 1436 - protein, 127 aa, Artificial Sequence
  No. 148  HC variable region
QVQLVQSGAEVKKPGASVKVSCKVSGYTLTELPIHWVRRAPGKGLEWMGRFDPEDGETIYAQNFQGRVTMTEDTSTDTAYMELSSLRSEDTAVYYCATDLTTVTNPLNYYYYGMDVWGQGTTVTVSS

SEQ ID NO: 1437 - protein, 110 aa, Artificial Sequence
  No. 149  LC variable region
ELELTQPPSASGTPGQRVTISCSGSSSNVGSNYVYWYQQLPGTAPKLLIYRNSQRPSGVPARFSGSKSGTSASLVISGLRSEDEADYYCAAWDDSLSGWMFGGGTQLTVL

SEQ ID NO: 1438 - protein, 125 aa, Artificial Sequence
  No. 149  HC variable region
QVQLVQSGADVKKPGASVKVSCKASGYAFTSYGTTWVRQAPGQGLEWMGWISGYNENSTHAQKFQGRVTMTTDKSTSTAYMELRSLRSDDTAVYYCARDALRYDILTGFTGFDYWGQGTQVTVSS

SEQ ID NO: 1439 - protein, 110 aa, Artificial Sequence
  No. 150  LC variable region
ELELTQPPSVSGTPGQRVTISCSGSSSNIGSNTVNWYQQLPGTAPKLLIYSNNQRPSGVPDRFSGSKSGTSASLAISGLQSEDEADYYCAAWDDSLSGPVFGGGTKVTVL

SEQ ID NO: 1440 - protein, 124 aa, Artificial Sequence
  No. 150  HC variable region
QVQLVQSGGGLVQPGGSLRLSCTASDFTFSSYAMSWVRQAPGKGLEWVSAISGSGGDTYYADSVKGRFTISRDNSKNTLYLQMNSLRAEDTAVYYCTKVRYYDFWSGWDVMDVWGQGTTVTVSS

SEQ ID NO: 1441 - protein, 111 aa, Artificial Sequence
  No. 151  LC variable region
ELELTQPPSVSGTPGQRVTISCTGSSSNIGAGYDVHWYQQLPGTAPKLLIYSNNQRPSGVPDRFSGSKSGTSASLAISGLQSEDEADYYCAAWDDSLNGPVFGGGTKVTVL

SEQ ID NO: 1442 - protein, 125 aa, Artificial Sequence
  No. 151  HC variable region
EVQLVESGGGLVQPGGSLRLSCAASGFTFSSYWMSWVRQAPGKGLEWVANIKQDGSEKYYVDSVKGRFTISRDNAKNSLYLQMNSLRAEDTAVYYCARGTYYYDSSGPLNWFDPWGQGTLVTVSS

SEQ ID NO: 1443 - protein, 103 aa, Artificial Sequence
  No. 152  LC variable region
ELQMTQSPSTLSLSPGERATLSCRASQSVSSYLAWYQQKPGQAPRLLIYDASNRATGIPARFSGSGSGTDFSLSISSLEPEDFAVYYCQQGLTFGGGTKVEIK

SEQ ID NO: 1444 - protein, 126 aa, Artificial Sequence
  No. 152  HC variable region
EVQLVQSGAEVKKPGSSVKVSCKASGGTFNSYAISWVRQAPGQGLEWMGGIIPFLGTANYAQKFQGRVTITADESTRTAYMELSSLRSEDTAMYYCATGKPYYCTGSTCYQPLGPWGQGTLVTVSS

SEQ ID NO: 1445 - protein, 108 aa, Artificial Sequence
  No. 153  LC variable region
ELVMTQSPGTLSLSPGERATLSCRASQSVSSSYLAWYQQKPGQAPRLLIYGASSRATGIPDRFSGSGSGTDFTLTISRLEPEDFAVYYCQQYGSSPYTFGQGTKVDIK

SEQ ID NO: 1446 - protein, 121 aa, Artificial Sequence; identical to SEQ ID NO: 1270
  No. 153  HC variable region

SEQ ID NO: 1447 - protein, 110 aa, Artificial Sequence
  No. 154  LC variable region
ELELTQPPSVSGSPGQSITISCTGTSSDVGNYNYVSWYQQHPDKAPKLMIYDVSNRPSGVSNRFSGSKSGNTASLTISGLQAEDEADYYCSSYTSSGTLVFGGGTKLTVL

SEQ ID NO: 1448 - protein, 121 aa, Artificial Sequence
  No. 154  HC variable region
QVQLVQSGAEVKKPGASVKVSCKVSGYTLPELSIHWVRQAPGKGLEWMGGFDPENGETIHAQRFQGRVTMTEDTSTDTAYMELSSLRSEDTAVYYCATSTPMIRASWFDPWGQGTLVTVSS

SEQ ID NO: 1449 - protein, 110 aa, Artificial Sequence
  No. 155  LC variable region
ELELTQPPSVSGTPGQRVTISCSGSSSNIGSNYVNWYQHLPGTAPKLLIYSNNQRPSGIPDRFSGSKSGTSASLAISGLQSEDEADYFCATWDDSLNGQVFGGGTKVTVL

SEQ ID NO: 1450 - protein, 115 aa, Artificial Sequence
  No. 155  HC variable region
QVQLVQSGGGLVQPGGSLRLSCAASGFTFSDYWMSWVRQAPGKGLEWVGNIKEDGSEKYYVDSVKGRFTISRDNAKNSLYLQMNSLRAEDTAVYYCARGYSGNFWGQGTLVTVSS

SEQ ID NO: 1451 - protein, 110 aa, Artificial Sequence
  No. 156  LC variable region
ELVVTQPPSVSAAPGQKVTISCSGSSSNIGNNYVSWYQQLPGTAPKLLIYDNNKRPSGIPDRFSGSKSGTSATLGITGLQTGDEADYYCGTWDSSLSAVVFGGGTKVTVL

SEQ ID NO: 1452 - protein, 122 aa, Artificial Sequence; identical to SEQ ID NO: 1260
  No. 156  HC variable region

SEQ ID NO: 1453 - protein, 108 aa, Artificial Sequence
  No. 157  LC variable region
ELVMTQSPGTLSLSPGERATLSCRASQSVGRNYLAWYQHKPGQAPRLLIYDASTRATDIPDRFSGSGSGTDFTLTISRLEPEDFAVYYCQQYGSSPITFGQGTRLEIK

SEQ ID NO: 1454 - protein, 129 aa, Artificial Sequence
  No. 157  HC variable region
QITLKESGPGLVKPSETLSLTCTVSGDSISSSSYYWGWIRQPPGKGLEWIGSIYYSGSTYYNPSLKSRVTISVDTSKNQFSLNLSSATAADTAVYYCARGSRGYYDFLTGYSTGGFDYWGQGTLVAVSS

SEQ ID NO: 1455 - protein, 107 aa, Artificial Sequence
  No. 158  LC variable region
ELVLTQSPATLSLSPGERATLSCRASQSVSSYLAWYQQKPGQAPRLLIYDASNRATGIPARFSGSGSGTDFTLTISRLEPEDFAVYYCHQYGTSPFTFGPGTKVDIK

SEQ ID NO: 1456 - protein, 129 aa, Artificial Sequence; identical to SEQ ID NO: 1228
  No. 158  HC variable region

SEQ ID NO: 1457 - protein, 108 aa, Artificial Sequence
  No. 159  LC variable region
ELVMTQSPGTLSLSPGERATLSCRASQSVSSSYLAWYQQKPGQAPRLLIYGASSRATGIPDRFSGSGSGTDFTLTISRLEPEDFAVYYCQQYGSSPLTFGGGTKVDIK

SEQ ID NO: 1458 - protein, 129 aa, Artificial Sequence
  No. 159  HC variable region
QVQLQESGPGLVKPSETLSLTCTVSGDSISSGGYYWSWIRQHPGKGLEWIGYIYYSGSTYYNPSLKSRVTISVDTSKNQFSLNLSSATAADTAVYYCARGSRGYYDFLTGYSTGGFDYWGQGTLVAVSS

SEQ ID NO: 1459 - protein, 108 aa, Artificial Sequence
  No. 160  LC variable region
ELTLTQSPGTLSLSPGERATLSCRASQSVSSSYLAWYQQKPGQAPRLLIYGASSRATGIPDRFSGSGSGTDFTLTISRLEPEDFAVYYCQQYGSSPLTFGGGTKLEIK

SEQ ID NO: 1460 - protein, 129 aa, Artificial Sequence; identical to SEQ ID NO: 1184
  No. 160  HC variable region

SEQ ID NO: 1461 - protein, 107 aa, Artificial Sequence
  No. 161  LC variable region
ELQMTQSPATLSLSPGERATLSCRASQSVNSYSAWYQQKPGQAPRLLIYDASNRATGIPARFSGSGSGTDFTLTISSLEPEDFAVYYCQQYHTSPITFGQGTRLEIK

SEQ ID NO: 1462 - protein, 129 aa, Artificial Sequence; identical to SEQ ID NO: 1184
  No. 161  HC variable region

SEQ ID NO: 1463 - protein, 107 aa, Artificial Sequence
  No. 162  LC variable region
ELVLTQSPATLSLSPGERATLSCRASQSVSSYLAWYQQKPGQAPRLLIYDASNRATGIPARFSGSGSGTDFTLTISRLEPEDFAVYYCQQYGSSPITFGQGTRLEIK

SEQ ID NO: 1464 - protein, 129 aa, Artificial Sequence; identical to SEQ ID NO: 1244
  No. 162  HC variable region

SEQ ID NO: 1465 - protein, 111 aa, Artificial Sequence
  No. 163  LC variable region
ELALTQPPSVSGSPGQSITISCTGTSSNVGDYNYVSWYQQHPGKAPKLMIYDVTNRPSGVSDRFSGSKSGNTASLTISGLQAEDEADYYCSSYTSGSTPVVFGGGTKLTVL

SEQ ID NO: 1466 - protein, 129 aa, Artificial Sequence
  No. 163  HC variable region
EVQLVQSGPGLVKPSETLSLTCTVSGDSISSSSYYWGWIRQPPGKGLEWIGNIFYSGSTYYNPSLKSRVTISVDTSKNQFSLKLSSVTAADTAVYYCARGSRGYYDILTGYSTGGFDYWGQGTLVTVSS

SEQ ID NO: 1467 - protein, 108 aa, Artificial Sequence
  No. 164  LC variable region
ELVMTQSPATLSVSPGERATLSCRASQSVSSSYLAWYQQKPGQAPRLLIYGASSRATGIPDRFSGSGSGTDFTLTISRLEPEDFAVYYCQQYGTSPLTFGGGTKLEIK

SEQ ID NO: 1468 - protein, 129 aa, Artificial Sequence
  No. 164  HC variable region
EVQLLESGPGLVKPSETLSLTCTVSGDSISSSSYYWGWIRQPPGKGLEWIGNIFYSGSTYYNPSLKSRVTISVDTSKNQFSLKLSSVTAADTAVYYCARGSRGYYDILTGYSTGGFDYWGQGTLVTVSS

SEQ ID NO: 1469 - protein, 108 aa, Artificial Sequence
  No. 165  LC variable region
ELVMTQSPGTLSLSPGERATLSCRASQSVSSSYLAWYQQKPGQAPRLLIYGASSRATGIPDRFSGSGSGTDFTLTISRLEPEDFAVYYCQQYGSSPLAFGGGTKLEIK

SEQ ID NO: 1470 - protein, 129 aa, Artificial Sequence; identical to SEQ ID NO: 1468
  No. 165  HC variable region

SEQ ID NO: 1471 - protein, 107 aa, Artificial Sequence; identical to SEQ ID NO: 1219
  No. 166  LC variable region

SEQ ID NO: 1472 - protein, 129 aa, Artificial Sequence
  No. 166  HC variable region
QVQLQESGPGLVKPSETLSLTCTVSGDSISGSSYYWGWIRQPPGKGLEWIGNIFYSGSTYYNPSLKSRVTISVDTSKNQFSLKLSSVTAADTAMYYCARGSRGYYDILTGYSTGGFDYWGQGTLVTVSS

SEQ ID NO: 1473 - protein, 107 aa, Artificial Sequence
  No. 167  LC variable region
ELVMTQSPATLSLSPGERATLSCRASQSVRNYLAWYQQKPGQAPRLLMYDASTRATGIPARFSGSGSGTDFTLTISRLEPEDFAVYYCQQYGRSPLTFGGGTKLEIK

SEQ ID NO: 1474 - protein, 129 aa, Artificial Sequence
  No. 167  HC variable region
QVQLQESGPGLVKPSGTLSLTCTVSGDSISGSSYYWGWIRQPPGKGLEWIGNIFYSGSTYYNPSLKSRVTISVDTSKNQFSLKLSSVTAADTAMYYCARGSRGYYDILTGYSTGGFDYWGQGTLVTVSS

SEQ ID NO: 1475 - protein, 107 aa, Artificial Sequence
  No. 168  LC variable region
ELVLTQSPATLSLSPGERATLSCRASQSVSSYLAWYQQKPGQAPRLLIYGASSRATGIPDRFSGSGSGTDFTLTISRLEPEDFAVYYCQQHGSSPFTFGPGTKVDIK

SEQ ID NO: 1476 - protein, 129 aa, Artificial Sequence; identical to SEQ ID NO: 1472
  No. 168  HC variable region

SEQ ID NO: 1477 - protein, 110 aa, Artificial Sequence
  No. 169  LC variable region
ELVLTQPPSASGTPGQRVTISCSGSSSNIGSNYVYWYQQLPGTAPKLLIYRNNQRPSGVPDRFSGSKSGTSASLAISGLRSEDEADYYCAAWDDSLSGKVFGGGTELTVL

SEQ ID NO: 1478 - protein, 131 aa, Artificial Sequence
  No. 169  HC variable region
EVQLVQSGAEVKKPGSSVKVSCKASGGTFSSYAISWVRQAPGQGLEWMGGIIPIFGTANYAQKFQGRVTITADESTSTAYMELSSLRSEDTAVYYCARDGVVVPAVMYDTTDPYYYGMDVWGQGTTVTVSS

SEQ ID NO: 1479 - protein, 110 aa, Artificial Sequence
  No. 170  LC variable region
ELVVTQPPSVSGAPGQRVTISCSGSSSNIGSNTVNWYQQLPGTAPKLLIYSNNQRPSGVPDRFSGSKSGTSASLAISGLRSEDEADYYCSTWDDSLSGRVFGGGTKVTVL

SEQ ID NO: 1480 - protein, 131 aa, Artificial Sequence; identical to SEQ ID NO: 1304
  No. 170  HC variable region

SEQ ID NO: 1481 - protein, 110 aa, Artificial Sequence
  No. 171  LC variable region
ELELTQPPSVSGTPGQGVTISCSGLTSNIGSNFVYWYQQLPGTAPKLLIYRNNERPSGVPDRFSGSKSGTSASLAISGLRSEDEGEYFCAAWDDTLVGRVFGGGTQLTVL

SEQ ID NO: 1482 - protein, 131 aa, Artificial Sequence
  No. 171  HC variable region
EVQLVQSGAEVKKPGSSVKVSCKASGGTFSSYAISWVRQAPGQGLEWMGGIIPIFGTANYAQKFQDRVTITADESTSTAYMELSSLRSEDTAVYYCARDGVVVPAVMYDTTDPYYYGMDVWGQGTTVTVPS

SEQ ID NO: 1483 - protein, 109 aa, Artificial Sequence
  No. 172  LC variable region
ELVVTQEPSASGTPGQRVTISCSGSSSNIGSNTVNWYQQLPGTAPKLLIYSNNQRPSGVPDRFSGSKSGTSASLAISGLRSEDEADYYCAAWDDSLSGPVFGGTQLTVL

SEQ ID NO: 1484 - protein, 119 aa, Artificial Sequence; identical to SEQ ID NO: 1214
  No. 172  HC variable region

SEQ ID NO: 1485 - protein, 110 aa, Artificial Sequence; identical to SEQ ID NO: 1145
  No. 173  LC variable region

SEQ ID NO: 1486 - protein, 119 aa, Artificial Sequence; identical to SEQ ID NO: 1214
  No. 173  HC variable region

SEQ ID NO: 1487 - protein, 111 aa, Artificial Sequence
  No. 174  LC variable region
ELVLTQPPSASGTPGQRVTISCSGSSSNIGSNTVNWYQQLPGTAPKLLIYSNNQRPSGVPDRFSGSKSGTSASLAISGLQSEDEADYYCAAWDDSLNGSVVFGGGTKVTVL

SEQ ID NO: 1488 - protein, 119 aa, Artificial Sequence
  No. 174  HC variable region
EVQLVQSGAEVKKPGESLKISCKSSGYSFISYWIAWVRQMPGKGLEWMGIIYPGDSDTRYSPSFQGQVTISVDKSITTAYLQWSSLEASDTAMYYCARGPNLYNWFDFWGQGTLVTVSS

SEQ ID NO: 1489 - protein, 111 aa, Artificial Sequence
  No. 175  LC variable region
ELVLTQPPSASGTPGQRVTISCSGSSSNIGSNTVNWYQQLPGTAPKLLIYSNNQRPSGVPDRFSGSKSGTSASLAISGLQSEDEADYYCAAWDDSLNGHVVFGGGTQLTVL

SEQ ID NO: 1490 - protein, 119 aa, Artificial Sequence
  No. 175  HC variable region
QVQLVQSGAEVKKPGESLKISCKGSGYSFISYWIAWVRQMPGKGLEWMGIIYPGDSDTRYSPSFQGQVTISVDKSITTAYLQWSSLEASDTAMYYCARGPNLYNWFDFWGQGTLVTVSS

SEQ ID NO: 1491 - protein, 110 aa, Artificial Sequence; identical to SEQ ID NO: 1359
  No. 176  LC variable region

SEQ ID NO: 1492 - protein, 119 aa, Artificial Sequence; identical to SEQ ID NO: 1214
  No. 176  HC variable region

SEQ ID NO: 1493 - protein, 107 aa, Artificial Sequence
  No. 177  LC variable region
ELVMTQSPATLSLSPGERATLSCRASQSVSSYLAWYQQKPGQAPRLLIYDASNRATGIPARFSGSGSGTDFTLTISSLQAEDVAVYYCQQYYSTPFTFGPGTKVDIK

SEQ ID NO: 1494 - protein, 122 aa, Artificial Sequence; identical to SEQ ID NO: 1234
  No. 177  HC variable region

SEQ ID NO: 1495 - protein, 107 aa, Artificial Sequence
  No. 178  LC variable region
ELVMTQSPSSLSASVGDRVTITCRASQGISNSLAWYQQKPGKAPKLLLYAASRLESGVPSRFSGSGSGTDYTLTISSLQPEDFATYYCQQYYSTPFTFGPGTKVDIK

SEQ ID NO: 1496 - protein, 122 aa, Artificial Sequence; identical to SEQ ID NO: 1234
  No. 178  HC variable region

SEQ ID NO: 1497 - protein, 110 aa, Artificial Sequence
  No. 179  LC variable region
ELELTQPPSVSGTPGQRVTISCSGSSSNIGSNTVNWYQQLPGTAPKLLIYSNNQRPSGVPDRFSGSKSGTSASLAISGLQSEDEADYYCAAWDDSLNSGVFGGGTKLTVL

SEQ ID NO: 1498 - protein, 121 aa, Artificial Sequence
  No. 179  HC variable region
EVQLVQSGAEVKKPGESLKISCKGSGYSFTSNWIGWVRQMPGKGLEWMGIIYPGDSDTRYSPSFQGQVTISADKSISTAYLQWSSLKASDTAMYYCARTYGSGSYSDFDYWGQGTLVTVSS

SEQ ID NO: 1499 - protein, 110 aa, Artificial Sequence
  No. 180  LC variable region
ELVLTQPPSASGTPGQRVTISCSGSSSNIGSNTVNWYQQLPGTAPKLLIYSNNQRPSGVPDRFSGSKSGTSASLAISGLQSEDEADYYCAAWDDSLNGGVFGGGTKVTVL

SEQ ID NO: 1500 - protein, 121 aa, Artificial Sequence
  No. 180  HC variable region
QVQLVQSGAEVKKPGESLKISCKGSGYSFTSNWIGWVRQMPGKGLEWMGIIYPGDSDTRYSPSFQGQVTISADKSISTAYLQWSSLKASDTAMYYCARTYGSGSYSDFDYWGQGTLVTVSS

SEQ ID NO: 1501 - protein, 111 aa, Artificial Sequence
  No. 181  LC variable region
ELELTQPPSVSGAPGQRVTISCTGSSSNIGAGYDVHWYQQLPGTAPKLLIYGNSNRPSGVPDRFSGSKSGTSASLAITGLRAEDEADYYCQSYDSSLSGWVFGGGTKLTVL

SEQ ID NO: 1502 - protein, 129 aa, Artificial Sequence
  No. 181  HC variable region
EVQLVESGGGLVQPGGSLRLSCAASGFTFSDYAMSWVRQAPGKGLEWVSVISGSGGSTSNADSVKGRFTISRDNSKSTLYLQMNSLRTEDTAVYYCAKVYCGDDCYPVVGTPGDAFDIWGQGTMVTVSS

SEQ ID NO: 1503 - protein, 111 aa, Artificial Sequence; identical to SEQ ID NO: 1247
  No. 182  LC variable region

SEQ ID NO: 1504 - protein, 129 aa, Artificial Sequence; identical to SEQ ID NO: 1216
  No. 182  HC variable region

SEQ ID NO: 1505 - protein, 110 aa, Artificial Sequence
  No. 183  LC variable region
ELVLTQPPSASGTPGQRVTISCSGSSSNIGSNTVNWYQQLPGTAPKLLIYSNNQRPSGVPDRFSGSKSGTSASLAISGLQSEDEADYYCAAWDDSLMQGVFGGGTKVTVL

SEQ ID NO: 1506 - protein, 120 aa, Artificial Sequence
  No. 183  HC variable region
EVQLVQSGAEVKKPGESLKISCKGSGYSFSNYWIAWVRQMPGKGLEWMGIIYPYDSDTRKSPSFQGQVTMSADKSITTAYLQWSSLKTSDTAMYYCARQDSGTYGWIDYWGQGTLVTVSS

SEQ ID NO: 1507 - protein, 110 aa, Artificial Sequence
  No. 184  LC variable region
ELMLTQPHSVSESPGKTVTISCTRSSGSIASNYVQWYQQRPGSSPTTVIYEDNQRPSGVPDRFSGSIDSSSNSASLTISGLKTEDEADYYCQSYDSSNWVFGGGTKVTVL

SEQ ID NO: 1508 - protein, 120 aa, Artificial Sequence
  No. 184  HC variable region
EVQLLESGPGLVKPSETLSLTCTVSGGSISSSSYYWGWIRQPPGKGLEWIGNFYYSGSTYYNPSLKSRVTISVDTSKNQFSLKLNSVTAADTAVYFCARQEWLRGGFDDWGQGTLVTVSS

SEQ ID NO: 1509 - protein, 110 aa, Artificial Sequence
  No. 185  LC variable region
ELQMTQSPSVSGTPGQRVTISCSGSSSNVGSNIVNWYQQLPGTAPKLLIYNNNQRPSGVPDRFSGSKSGTSASLAISGLQSEDEADYYCAAWDDSLNAWVFGGGTKVDIK

SEQ ID NO: 1510 - protein, 119 aa, Artificial Sequence
  No. 185  HC variable region
EVQLVQSGAEVKKPGESLKISCKGSGYSFSNHWIAWVRQMPGKGLEWMGIIYPYDSDTKYSPSFQGQVTISADKSVSTAYLQWSSLKASDTAMYYCARNPTVTNWFDSWGQGTLVTVSS

SEQ ID NO: 1511 - protein, 113 aa, Artificial Sequence
  No. 186  LC variable region
ELELTQPPSVSGAPGQRVTISCTGSSSNIGAGYDVHWYQQLPGTAPKLLIYGNSNRPSGVPDRFSGSKSGTSASLAITGLQAEDEADYYCQSYDSSLSGPNWVFGGGTKVTVL

SEQ ID NO: 1512 - protein, 129 aa, Artificial Sequence
  No. 186  HC variable region
EVQLVQSGAEVKKPGSSVKVSCKASGGTFSSYAISWVRQAPGQGLEWMGGIIPFFGTSNYAQKFQGRVTVTADESTSTAYMELSSLRSEDTAVYYCARGQFSDSSGYQHPYYDYGMDVWGQGTTVTVSS

SEQ ID NO: 1513 - protein, 110 aa, Artificial Sequence
  No. 187  LC variable region
ELALTQPPSVSGSPGQSITISCTGTSSDVGGYNYVSWYQQHPGKAPKLMIYDVSNRPSGVSNRFSGSKSGNTASLTISGLQAEDEADYYCSSYTSSSTLVFGGGTKLTVL

SEQ ID NO: 1514 - protein, 127 aa, Artificial Sequence
  No. 187  HC variable region
EVQLVQSGAEVKKPGSSVKVSCKASGGTFSTHALSWVRQAPGQGLEWMGGIIPIFGPADYAQKFQGRVTITADKSTSTAYMELSSLRSDDTAVYYCARGLSLGFCSAGSCYDYLDYWGQGTLVTVSS

SEQ ID NO: 1515 - protein, 110 aa, Artificial Sequence
  No. 188  LC variable region
ELELTQPPSVSGTPGQRVTISCSGSSSDIGSNTVNWYQQLPGTAPKLLIYSNNQRPSGVPDRFSGSKSGTSASLAISGLQSEDEADYYCAAWDDSLNGWVFGGGTKVTVL

SEQ ID NO: 1516 - protein, 133 aa, Artificial Sequence
  No. 188  HC variable region
QVQLVQSGAEVKKPGSSVKVSCKASGGTFSNYAINWVRQAPGQGLEWMGGIIPIFGTANYAQKFQGRVTITADESTSTAYMELSSLRSEDTAVYYCARDRYPGYYDILTGQIGTGERNAMDVWGQGTTVTVSS

SEQ ID NO: 1517 - protein, 111 aa, Artificial Sequence
  No. 189  LC variable region
ELVLTQPPSVSGAPGQRVTISCTGSSSNIGAGYDVHWYQQLPGTAPKLLIYGNSNRPSGVPDRFSGSKSGTSASLAITGLQAEDEADYYCQSYDSSLSGSVFGGGTKLTVL

SEQ ID NO: 1518 - protein, 124 aa, Artificial Sequence
  No. 189  HC variable region
EVQLVQSGAEVKKPGSSVKVSCKTSGGTFSNYPLTWVRQAPGQGLEWLGGIIPIIGATNYAQKFQGRVTITADESTSTAFMELSSLRSEDTAVYYCARGRGYSGYGAAYYFDYWGQGTLVTVSS

SEQ ID NO: 1519 - protein, 108 aa, Artificial Sequence
  No. 190  LC variable region
ELELTQPPSVSVAPGKTARITCGGNNIGSKSVHWYQQKPGQAPVLVIYYDSDRPSGIPERFSGSNSGNTATLTISRVEAGDEADYYCQVWDSSSDHWVFGGGTKVTVL

SEQ ID NO: 1520 - protein, 121 aa, Artificial Sequence
  No. 190  HC variable region
EVQLVQSGAEVKKPGASVKVSCKASGYTFTSYYIHWVRQAPGQGLEWMGFINPSDVTTYYAQKFQGRVTMTRDTSTSTVYMELSSLRSDDTAVYFCARSRIAPTEDFFDYWGQGSLVTVSS

SEQ ID NO: 1521 - protein, 1273 aa, Artificial Sequence
  SARS-CoV-2 Spike protein
MFVFLVLLPLVSSQCVNLTTRTQLPPAYTNSFTRGVYYPDKVFRSSVLHSTQDLFLPFFSNVTWFHAIHVSGTNGTKRFDNPVLPFNDGVYFASTEKSNIIRGWIFGTTLDSKTQSLLIVNNATNVVIKVCEFQFCNDPFLGVYYHKNNKSWMESEFRVYSSANNCTFEYVSQPFLMDLEGKQGNFKNLREFVFKNIDGYFKIYSKHTPINLVRDLPQGFSALEPLVDLPIGINITRFQTLLALHRSYLTPGDSSSGWTAGAAAYYVGYLQPRTFLLKYNENGTITDAVDCALDPLSETKCTLKSFTVEKGIYQTSNFRVQPTESIVRFPNITNLCPFGEVFNATRFASVYAWNRKRISNCVADYSVLYNSASFSTFKCYGVSPTKLNDLCFTNVYADSFVIRGDEVRQIAPGQTGKIADYNYKLPDDFTGCVIAWNSNNLDSKVGGNYNYLYRLFRKSNLKPFERDISTEIYQAGSTPCNGVEGFNCYFPLQSYGFQPTNGVGYQPYRVVVLSFELLHAPATVCGPKKSTNLVKNKCVNFNFNGLTGTGVLTESNKKFLPFQQFGRDIADTTDAVRDPQTLEILDITPCSFGGVSVITPGTNTSNQVAVLYQDVNCTEVPVAIHADQLTPTWRVYSTGSNVFQTRAGCLIGAEHVNNSYECDIPIGAGICASYQTQTNSPRRARSVASQSIIAYTMSLGAENSVAYSNNSIAIPTNFTISVTTEILPVSMTKTSVDCTMYICGDSTECSNLLLQYGSFCTQLNRALTGIAVEQDKNTQEVFAQVKQIYKTPPIKDFGGFNFSQILPDPSKPSKRSFIEDLLFNKVTLADAGFIKQYGDCLGDIAARDLICAQKFNGLTVLPPLLTDEMIAQYTSALLAGTITSGWTFGAGAALQIPFAMQMAYRFNGIGVTQNVLYENQKLIANQFNSAIGKIQDSLSSTASALGKLQDVVNQNAQALNTLVKQLSSNFGAISSVLNDILSRLDKVEAEVQIDRLITGRLQSLQTYVTQQLIRAAEIRASANLAATKMSECVLGQSKRVDFCGKGYHLMSFPQSAPHGVVFLHVTYVPAQEKNFTTAPAICHDGKAHFPREGVFVSNGTHWFVTQRNFYEPQIITTDNTFVSGNCDVVIGIVNNTVYDPLQPELDSFKEELDKYFKNHTSPDVDLGDISGINASVVNIQKEIDRLNEVAKNLNESLIDLQELGKYEQYIKWPWYIWLGFIAGLIAIVMVTIMLCCMTSCCSCLKGCCSCGSCCKFDEDDSEPVLKGVKLHYT

SEQ ID NO: 1522 - protein, 218 aa, Artificial Sequence
  RBD(Receptor binding domain) of SARS-CoV-2 Spike protein
RVQPTESIVRFPNITNLCPFGEVFNATRFASVYAWNRKRISNCVADYSVLYNSASFSTFKCYGVSPTKLNDLCFTNVYADSFVIRGDEVRQIAPGQTGKIADYNYKLPDDFTGCVIAWNSNNLDSKVGGNYNYLYRLFRKSNLKPFERDISTEIYQAGSTPCNGVEGFNCYFPLQSYGFQPTNGVGYQPYRVVVLSFELLHAPATVCGPKKSTNLVKN
